(19) United States
(12) Patent Application Publication
(10) Pub. No.: US 2011/0053865 A1
(43) Pub. Date: Mar. 3, 2011

(54) AMINO ACID SEQUENCES DIRECTED AGAINST HETERODIMERIC CYTOKINES AND/OR THEIR RECEPTORS AND POLYPEPTIDES COMPRISING THE SAME

(75) Inventors: Michael John Scott Saunders, Brussels (BE); Christophe Blanchetot, Destelbergen (BE); Heidi Rommelaere, Gent (BE); Jo Vercammen, Sint-Pieters-Leeuw (BE); Johannes Joseph Wilhelmus De Haard, Oudelande (NL)

(73) Assignee: ABLYNX N.V., Ghent-Zwijnaarde (BE)

(21) Appl. No.: 12/745,052

(22) PCT Filed: Nov. 27, 2008
(86) PCT No.: PCT/EP2008/066365

§ 371 Date: Sep. 30, 2010

Related U.S. Application Data
(60) Provisional application No. 61/004,332, filed on Nov. 27, 2007.
(60) Provisional application No. 61/005,265, filed on Dec. 4, 2007.
(60) Provisional application No. 61/005,324, filed on Dec. 4, 2007.
(60) Provisional application No. 61/005,331, filed on Dec. 4, 2007.

(51) Int. Cl. A61K 38/16; C07K 14/00; C07H 21/00; A61P 43/00

(52) U.S. Cl. 514/21.2; 530/350; 536/23.1

(57) ABSTRACT

The present invention relates to amino acid sequences that are directed against (at defined herein) heterodimeric cytokines and/or their receptors, as well as to compounds or constructs, and in particular proteins and polypeptides, that comprise or essentially consists of one or more such amino acid sequences ( also referred to herein as “amino acid sequences of the invention”, “compounds of the invention”, and “polypeptides of the invention”, respectively). The invention also relates to nucleic acids encoding such amino acid sequences and polypeptides (also referred to herein as “nucleic acids of the invention” or “nucleotides sequences of the invention”); to methods for preparing such amino acid sequences and polypeptides; to hose cells expressing or capable of expressing such amino acid sequences or polypeptides; to compositions, and in particular to pharmaceutical compositions, that complete such amino acid sequences, polypeptides, nucleic acids and/or host cells; and to uses of such amino acid sequences or polypeptides, nucleic acids, host cells and/or compositions, in particular for prophylactic, therapeutic or diagnostic purposes, such as the prophylactic, therapeutic or diagnostic purposes mentioned herein.

[0001] The present invention relates to amino acid sequences that are directed against (as defined herein) heterodimeric cytokines and/or their receptors, as well as to compounds or constructs, and in particular proteins and polypeptides, that comprise or essentially consist of one or more such amino acid sequences (also referred to herein as “amino acid sequences of the invention”, “compounds of the invention”, and “polypeptides of the invention”, respectively).

[0002] The invention also relates to nucleic acids encoding such amino acid sequences and polypeptides (also referred to herein as “nucleic acids of the invention” or “nucleotide sequences of the invention”); to methods for preparing such amino acid sequences and polypeptides; to host cells expressing or capable of expressing such amino acid sequences or polypeptides; to compositions, and in particular to pharmaceutical compositions, that comprise such amino acid sequences, polypeptides, nucleic acids and/or host cells; and to uses of such amino acid sequences or polypeptides, nucleic acids, host cells and/or compositions, in particular for prophylactic, therapeutic or diagnostic purposes, such as the prophylactic, therapeutic or diagnostic purposes mentioned herein.

[0003] Other aspects, embodiments, advantages and applications of the invention will become clear from the further description herein.

[0004] Heterodimeric cytokines, their receptors and the pathways, signalling, biological mechanisms and physiological effect in which they and their receptors are involved are known from the prior art.

[0005] Some of the best-known examples of heterodimeric cytokines and their receptors are IL-12, IL-23 and IL-27, and their receptors IL-12R, IL-23R, and IL-27, respectively. As their name implies, these cytokines are heterodimeric, consisting of two different subunits, i.e. IL12p40 and IL12p35 in case of IL-12, IL12p40 and IL23p19 (also called IL-30B) in case of IL-23, and EBI3 and IL27p28 in case of IL-27. Also, the receptors for these heterodimeric cytokines consist of multiple subunits, i.e. IL12Rbeta1 and IL12Rbeta2 in case of IL-12R, IL12Rbeta1 and IL23R in case of IL-23R, and WSX1 and gp130 in case of IL-27R.

[0006] IL12 remains the prototypical heterodimeric cytokine (composed of IL12p40 and IL12p35), it was not until relatively recently that other related heterodimers exist.

[0007] In 2000, IL-23 and its subunit p19 (IL23p19) were identified on the basis of a homology search for IL-6-family members. Their studies revealed that p19 dimerizes with IL12p40 and that this cytokine, known as IL23, uses IL12Rβ1, but not IL12Rβ2, as a component of its high-affinity receptor. Functional cloning identified the other subunit of the receptor for IL23, a subunit known as IL23R (text adapted from CA Hunter 2003). It was also found that IL-23 plays an important role in proliferation of The17 cells.

[0008] IL27 is another heterodimeric cytokine related to IL12 composed of EBI3 and IL27p28. Epstein-Barr virus (EBV)-induced molecule 3 (EBI3) had been identified as an IL-12p40 homologue. In 2002, the p28 subunit of IL-27 (IL-27p28) was discovered as a protein with homology to IL-12p35 and IL-6.

[0009] Recently, the existence of a further heterodimeric cytokine belonging to the IL-12 family, called IL-35, has been described (Collison et al., Nature, 22 Nov. 2007, 566). This heterodimeric cytokine is described as contributing to regulator T-cell function and is composed of the IL12p35 and EBI-3 subunits.

[0010] Thirty-four known type I cytokine receptors have been described, and although the ligands are more difficult to identify, there are at least 27 that can be clustered into 5 distinct families (see Boulay et al 2003). One of these groupings is composed of the ligands for a series of cytokine receptors that use gp130 (glycoprotein 130) or one of several gp130-related proteins. These include the receptors for IL6 and the receptors for the heterodimeric cytokines IL-12, IL-23 and IL-27 (Hunter, supra).

[0011] The IL12 receptor is a heterodimer of IL12Rbeta1 and IL12Rbeta2.

[0012] The IL23 receptor is a heterodimer of IL12Rbeta1 and IL23R. IL12Rbeta1 is a used by both IL12 and IL-23 for signalling. Targeting this receptor will lead to a blockade of both IL-12 and IL-23 signaling.

[0013] The IL27 receptor is a hetero dimer composed of WSX1 (Identified on the basis of a homology search for gp130-like proteins) and gp130 which is a common element of the receptor for IL-6 (which comprises IL-6Rα and gp130) and the receptor for IL27 (which comprises WSX1 and gp130), which is consistent with the close familial relationship of these cytokines.

[0014] For further information on heterodimeric cytokines and their receptors, as well as the pathways, signalling, biological mechanisms and biological effects in which they are involved, and also the diseases in which they are associated, reference is made to the following prior art: Oppmann, 2000, Immunity, 13:751-725; Gubler et al., 1991, PNAS, 88: 4143-4147; Hunter, Nature Rev., Vol. 5, July 2003, 521; Watford et al., Cytokine and Growth Factor Reviews 14 (2003), 361-368; Boulay, Immunity, Vol. 19, 159-163 (2003); Goriely and Goldmann, American Journal of Transplantation 2007; 7: 208-284; Langrish et al., Immunological Reviews 2004, 202, 96-105; Kaufmann et al., J. Invest. Dermatol., 123: 1037-1044, 2004; Neurath, Nature Medecine, Vol. 13, January 2007, 26; Collison et al., Nature, 22 Nov. 2007, 566; Parham et al., The Journal of Immunology, 2002, 5699; EP 433 827; EP 1 210 434; EP 790 308; EP 790 309; EP 1 175 446; EP 0 969 867; EP 1 309 692; EP 1 002 084; EP 1 587 178; EP 1 589 998; WO 04/071517; EP 1 601 695; WO 05/079837; WO 06/068987; WO 07/027761; WO/2007/024846; WO 02/09748 and WO 06/069036; as well as the further prior art cited in these references and in the present specification. Some of the above references also describe antagonists of heterodimeric cytokines (such as conventional monoclonal antibodies) and mention diseases and disorders that can be prevented and/or treated by the use of such antagonists.

[0015] For the sequences of the various subunits of the heterodimeric cytokines and their receptors, reference is made to following Genbank accession numbers, which also mention additional information on as the pathways, signalling, biological mechanisms and biological effects in which they are involved, and also the diseases in which they are associated:

[0016] P19: NM_016584

[0017] P40: NM_{—}002187

[0018] IL12Rbeta1: NM_{—}005535

[0019] IL23R NM_{—}144701

[0020] IL12Rbeta2 NM_{—}001559

[0021] WSX1: IL27RA: NM_{—}004843

[0022] Gp130: NM_{—}002184 and NM_{—}175767

[0023] P35 (IL12A): NM_{—}000882

[0024] P28: NM_{—}145659

[0025] EBI3: NM_{—}005755

[0026] From the above, it will also be clear that the aforementioned heterodimeric cytokines and their receptors have some subunits in common., with for example IL12p40 being present in both IL-12 and IL-23, and for example IL-12Rbeta1 being present in both the (cognate) receptor for IL-12 as well as the (cognate) receptor for IL-23. Also, some of the other subunits present in the heterodimeric cytokines or the receptors, although not identical, are structurally and/or functionally similar, and on the basis of these similarities can be grouped as follows:
[0027] the p19, p35 and p28 subunits (and their present and future homologs), which will also be collectively referred to herein as the “p19-like subunits”, it being understood that the p19-like subunit of IL-12 is p35, the p19-like subunit of IL-23 is p19, the p19-like subunit of IL-27 is p28, and the p19-like subunit of IL-35 is p35. P19-like subunits (such as the p35) are also homologous to type I cytokines, such as IL6 and oncostatin M, and for example share the “four helix bundle” that is common to type I cytokines;
[0028] the p40 and EBI3 subunits (and their present and future homologs), which will also be collectively referred to herein as the “p40-like subunits”, it being understood that the p40-like subunit of IL-12 is p40, the p40-like subunit of IL-23 is p40, the p40-like subunit of IL-27 is EBI3, and the p40-like subunit of IL-35 is EBI3. P40-like subunits (such as IL12p40) are structurally related to the soluble IL-6 receptor (IL-6Rα);
[0029] the gp130 and IL-12beta-1 subunits (and their present and future homologs), which will also be collectively referred to herein as the “gp130-like subunits”, it being understood that the gp130-like subunit of the IL-12 receptor is IL-12Rbeta-1, the gp130-like subunit of the IL-23 receptor is IL-12Rbeta-1, and the gp130-like subunit of the IL-27 receptor is gp130.
[0030] the IL-12Rbeta-2, IL-23R and WSX-1 subunits (and their present and future homologs), which will also be collectively referred to herein as the “IL-23 subunits”, it being understood that the IL-23 subunit of the IL-12 receptor is IL-12Rbeta-2, the IL-23-like subunit of the IL-23 receptor is IL-23R, and the IL-23-like subunit of the IL-27 receptor is WSX-1.

[0031] It is generally known that cytokines and their receptors are critical players in (the pathways) regulating all aspects of immune responses. This is also the case for the heterodimeric cytokines that belong to the interleukin-12 (IL12)-related family and for their receptors. For example, IL 12—the prototypical heterodimeric member of the IL-12 family—induces interferon-□ (IFN-□) production by NK, T cells, dendritic cells (DC), and macrophages. IL-12 also promotes the differentiation of naive CD4⁺ T cells into T helper 1 (T_{H}1) cells that produce IFN-□ and aid in cell-mediated immunity. Therefore the central role of IL12 in the generation of T_{H}1 cells (cell-mediated immune response) has long been appreciated. For example, mouse models established that IL12 is required for the development of protective innate and adaptive immune response to intracellular pathogens.

[0032] IL23 and IL27—two of the other heterodimeric cytokines from the IL-12 family—also regulate T_{H}1-cell response, albeit with distinct functions. The ability of IL-23 to stimulate CD4⁺ T cells to produce IL-17 has a dominant role in the development and maintenance of autoimmune inflammation. By contrast, a principal function of IL-27 in viva is to limit the intensity and duration of innate and adaptive immune responses.

[0033] In addition IL12p40 can be found as a monomers or homodimers which have antagonistic activities.

[0034] Recently, IL23 was shown to be responsible for the chronic inflammation observed in inflammatory bowel disease. This was confirmed by the fact that the IL23R gene was identified as being involved in inflammatory bowel disease. It has also been found that p19 knock out mice are resistant to collagen-induced arthritis and colitis, whereas comparable p35 knock out mice were found to be more susceptible to collagen-induced arthritis. Also, when p19 knock out mice were crossed with IL-10 knock out mice, the resulting offspring were resistant to colitis, whereas similar crosses of p19 knock out mice with IL-10 knock out mice resulted in offspring that was susceptible to colitis. It was further found that a monoclonal antibody against p19 inhibits the development of EAE, a preclinical animal model for multiple sclerosis, and reduces serum levels of IL-17 (which is not regulated by IL-12). Also, IL-23 rather than IL-i 2 appears to be the essential cytokine in CNS autoimmune inflammation. All this results suggests that IL-23/p19 may be a more attractive target for the treatment of colitis, Crohn's diseases, IBD, multiple sclerosis, rheumatoid arthritis and some of the other diseases and disorders mentioned herein that IL-12/p35 or p40 (as a compound directed against p40 will probably modulate both IL-12 and IL-23). It should also be noted that the monoclonal antibodies CNTO 1275 and ABT-874 (see below) that are currently under clinical development are both directed against p40. Thus, one specific object of the invention is to provide amino acid sequences and polypeptides that are directed against p19, and in particular amino acid sequences and polypeptides that are specific for (as defined herein) p19 compared to both p35 and p40 and/or that are specific for (as defined herein) IL-23 compared to IL-12. Examples of such amino acid sequences and polypeptides will become clear from the description herein.

[0035] As further described herein, the amino acid sequences, polypeptides and compositions of the present invention can generally be used to modulate (as defined herein) the signalling that is mediated by heterodimeric cytokines and/or their receptors, to modulate (as defined herein) the biological pathways in which heterodimeric cytokines and/or their receptors are involved, and/or to modulate (as defined herein) the biological mechanisms, responses and effects associated with heterodimeric cytokines, their receptors, such signalling and/or these pathways (all the foregoing is also collectively referred to herein as “heterodimeric cytokine-mediated signalling”).

[0036] As such, the amino acid sequences, polypeptides and compositions of the present invention can generally be used to modulate the immune system and/or one or more specific immune responses in a subject to which one or more of the amino acid sequences, polypeptides and compositions of the present invention are administered (i.e. in therapeutically relevant amounts).

[0037] The term “heterodimeric cytokines” as used herein in its broadest sense generally includes any heterodimeric cytokine, i.e. a cytokine that comprises at least two, and more preferably only two, subunits.

[0038] In particular, the term “heterodimeric cytokine” as used herein encompasses heterodimeric cytokines that are associated with cell-mediated (T_{H}1) immunity, although the invention is its broadest sense is not limited thereto and also encompasses heterodimeric cytokines associated with humoral (T_{H}2) immunity.

[0039] According to one specific, but non-limiting aspect, the amino acid sequences and polypeptides of invention are directed against a heterodimeric cytokine that is chosen from heterodimeric cytokines that comprise a p40 subunit or p40-like subunit, such as a p40 subunit (present in for example IL-12 and IL-23) or Epstein-Barr virus (EBV)-induced molecule 3 (EB13, present in for example IL-27 and IL-35).

[0040] According to another specific, but non-limiting aspect, the amino acid sequences and polypeptides of invention are directed against a heterodimeric cytokine that is chosen from heterodimeric cytokines that comprise a p19 subunit or a p19-like subunit, such as a p19 subunit (present in for example IL-23), a p35 subunit (present in for example IL-12 and IL-35), or a p28 subunit (present in for example 1L-27) or a homolog thereof.

[0041] For example, the amino acid sequences and polypeptides of invention may be directed against a heterodimeric cytokine that will comprise at least one p19 subunit or p19-like subunit and at least one p40 subunit or p40-like subunit.

[0042] According to an even more specific, but non-limiting aspect, the amino acid sequences and polypeptides of invention are directed against a heterodimeric cytokine that is chosen from IL-12, IL-23, IL-27 and/or IL-35.

[0043] In one specific aspect, but non-limiting aspect, the amino acid sequences and polypeptides of the invention are directed against IL-23 (i.e. against p40, p19 or both). Such amino acid sequences and polypeptides of the invention (as well as compositions comprising the same), can be used for preventing and treating disorders associated with IL-23.

[0044] In another specific aspect, but non-limiting aspect, the amino acid sequences and polypeptides of the invention are directed against IL-12 (i.e. against p40, p35 or both). Such amino acid sequences and polypeptides of the invention (as well as compositions comprising the same), may be as further described herein, and can be used for preventing and treating disorders associated with IL-12.

[0045] The amino acid sequences, polypeptides and compositions can be used to modulate (as defined herein, and for example as an agonist or an antagonist) heterodimeric cytokines and their receptors; and/or the signaling, pathways, biological mechanisms and effects in which these are involved.

[0046] The amino acid sequences and polypeptides that are antagonists of heterodimeric cytokines and their receptors (and/or of the signaling, pathways, biological mechanisms and effects in which these are involved) can also be used to reduce or inhibit the agonistic effects of heterodimeric cytokines.

[0047] More generally, the amino acid sequences (such as the p19+ sequences, p19− sequences, p40+ sequences, p40− sequences, p35 sequences, IL-27 sequences, IL-12Rb1 sequences, IL-12Rb2 sequences and IL-23 sequences described herein), polypeptides (such as the—for example multivalent, multispecific and/or biparatopic—constructs described herein that comprise at least one p19+ sequence, p19− sequence, p40+ sequence, p40− sequence, p35 sequence, IL-27 sequence, IL-12Rb1 sequence, IL-12Rb2 sequence and/or IL-23 sequence) and compositions of the present invention can be used for the prevention and treatment (as defined herein) of diseases and disorders associated with heterodimeric cytokines and their receptors (and/or with the signaling, pathways, biological mechanisms and effects in which these are involved). Generally, “diseases and disorders associated with heterodimeric cytokines and their receptors” can be defined as diseases and disorders that can be prevented and/or treated, respectively, by suitably administering to a subject in need thereof (i.e. having the disease or disorder or at least one symptom thereof and/or at risk of attracting or developing the disease or disorder) of either a polypeptide or composition of the invention (and in particular, of a pharmaceutically active amount thereof) and/or of a known active principle active against heterodimeric cytokines and/or their receptors or a biological pathway or mechanism in which heterodimeric cytokines and/or their receptors is involved (and in particular, of a pharmaceutically active amount thereof). Examples of such diseases and disorders associated with heterodimeric cytokines and their receptors will be clear to the skilled person based on the disclosure herein, and for example include the following diseases and disorders: inflammation and inflammatory disorders such as bowel diseases (colitis, Crohn'disease, IBD), infectious diseases, psioriasis, cancer, autoimmune diseases (such as MS), carcoidis, transplant rejection, cystic fibrosis, asthma, chronic obstructive pulmonary disease, rheumatoid arthritis, viral infection, common variable immunodeficiency, and the various diseases and disorders mentioned in the prior art cited herein. Based thereon, it will also be clear to the skilled person with heterodimeric cytokines (and/or receptors thereof) are involved in which specific diseases and disorders.

[0048] In particular, the polypeptides and compositions of the present invention can be used for the prevention and treatment of diseases and disorders associated with heterodimeric cytokines and their receptors which are characterized by excessive and/or unwanted signalling mediated by heterodimeric cytokines and/or their receptors or by the pathway(s) in which heterodimeric cytokines and/or their receptors is involved. Examples of such diseases and disorders associated with heterodimeric cytokines and their receptors will again be clear to the skilled person based on the disclosure herein. For this purpose, usually antagonists of heterodimeric cytokines and their receptors (and/or with the signaling, pathways, biological mechanisms and effects in which these are involved) will be used.

[0049] Agonists of heterodimeric cytokines and their receptors (and/or with the signaling, pathways, biological mechanisms and effects in which these are involved) can be used to stimulate or enhance one or more immune response in a human or animal, for example for the prevention and/or treatment of diseases that are characterized by a weakened immune system or that may occur as a result of having a weakened immune system. Reference is for example made to Hunter (supra), Table 1, which lists several mice knock-outs in which various heterodimeric cytokines and receptors thereof (and in particular subunits thereof) have been knock-out, and the inflammatory phenotypes associated therewith.

[0050] IL12p40 has also been shown to have an essential role in autoimmune inflammation as shown in disease model system as EAE (Experimental Allergic Encephalomyelitis) or CIA (Collagen-induced arthritis).

[0051] Thus, without being limited thereto, the amino acid sequences and polypeptides of the invention can for example be used to prevent and/or to treat all diseases and disorders that are currently being prevented or treated with active principles that can modulate heterodimeric cytokines and/or their receptors-mediated signalling, such as those mentioned in the prior art cited above (for example, the monoclonal antibody CNTO 1275 that is described in WO 02/09748 and WO 06/069036; ABT-874, a monoclonal against p40 that is being developed by Abbott; as well as the small molecule Apilimod®, Syntha Pharmaceuticals). It is also envisaged that the polypeptides of the invention can be used to prevent and/or to treat all diseases and disorders for which treatment with such active principles is currently being developed, has been proposed, or will be proposed or developed in future. In addition, it is envisaged that, because of their favourable properties as further described herein, the polypeptides of the present invention may be used for the prevention and treatment of other diseases and disorders than those for which these known active principles are being used or will be proposed or developed; and/or that the polypeptides of the present invention may provide new methods and regimens for treating the diseases and disorders described herein.

[0052] As will be clear from the further description herein, the amino acid sequences of the invention may be in a so-called “monovalent” format (i.e. comprising or essentially consisting of a single antigen binding domain or binding unit) or in a “multivalent” format (i.e. comprising or essentially consisting of two or more binding domains or binding units—which may be the same or different—that are linked to each other, optionally via one or more suitable linkers). As also further described herein, such multivalent amino acid sequences and polypeptides of the invention may for example, without limitation, be multispecific (such as bispecific or trispecific) or multiparatopic (such as biparatopic) constructs (or be both multiparatopic and multispecific, such as a biparatopic construct against the p19 subunit that contains a further binding domain for binding to a serum protein, as exemplified herein); and may for example be constructs that comprise at least two binding domains or binding units that are each directed towards a different epitope on the same subunit of a heterodimeric cytokine, constructs that comprise at least two binding domains or binding units that each have a different biological function (for example one binding domain that can block or inhibit receptor-ligand interaction, and one binding domain that does not block or inhibit receptor-ligand interaction), or constructs that comprise at least two binding domains or binding units that are each directed towards a different subunit of a heterodimeric cytokine.

[0053] Examples of such constructs will become clear from the further disclosure herein.

[0054] It will also become clear from the further description herein that such constructs can generally be provided (and in particular, purposefully designed for a specific biological action) by suitably linking (optionally via suitable linkers) or combining two or more “monovalent” amino acid sequences of the invention (or by suitably linking or combining nucleotide sequences encoding such monovalent amino acid sequences to provide a nucleic acid that encodes the desired multivalent construct, and then suitably expressing said multivalent construct). Thus, it should be clear that the invention not only makes available the monovalent and multivalent amino acid sequences and polypeptides described herein, but also provides—by making available the monovalent amino acid sequences and polypeptides described herein—the skilled person with a range of different binding domains and binding units that can be used as “building blocks” to provide a range of different multivalent, multispecific and/or multiparatopic (and in particular, biparatopic) constructs (which may have different binding affinities, avidities, specificities, potencies and/or efficacies), which through the use of suitable “building blocks” as described herein can be purposefully designed for use in different aspects of the invention (as further described herein).

[0055] Consequently, the use of the various monovalent amino acid sequences of the invention as “building blocks” for providing the proteins and polypeptides of the invention (or nucleotide sequences/nucleic acids encoding the same, which can then be expressed to provide such proteins and polypeptides) form an important aspect of the invention.

[0056] For this purpose and for the other purposes described herein, the invention in a particular aspect provides a number of different amino acid sequences that each can be used as a single binding domain or binding unit, either as such (i.e. as a monovalent amino acid sequence as further described herein) or as part of (and/or as a “building block”) for, a multivalent, multispecific and/or multispecific construct, as further described herein.

[0057] In their monovalent form, these amino acid sequences may for example be classified as follows:
[0058] “p19 sequences”, i.e. amino acid sequences of the invention that are directed against (as defined herein) the p19 subunit (as present in for example IL-23). The p19 sequences described herein may be further subdivided into “p19+sequences” (i.e. p19 sequences that are directed against the p19 subunit and that are capable of modulating, neutralizing, blocking and/or inhibiting the binding of a heterodimeric cytokine comprising a p19 subunit to its (cognate) receptor, and in particular capable of are capable of modulating, neutralizing, blocking and/or inhibiting the binding of IL-23 to its (cognate) receptor, for example in the alpha-screen assay of Example 19 or 22) and “p19− sequences” (i.e. p19 sequences that are directed against the p19 subunit but that (per se/as such) are (essentially) not capable of modulating, neutralizing, blocking and/or inhibiting the binding of a heterodimeric cytokine comprising a p19 subunit to its (cognate) receptor);
[0059] “p40 sequences”, i.e. amino acid sequences of the invention that are directed against (as defined herein) the p40 subunit (as present in for example IL-12 and IL-23). The p40 sequences described herein may be further subdivided into “p40+sequences” (i.e. p40 sequences that are directed against the p40 subunit and that are capable of modulating, neutralizing, blocking and/or inhibiting the binding of a heterodimeric cytokine comprising a p40 subunit to its (cognate) receptor, and in particular capable of are capable of modulating, neutralizing, blocking and/or inhibiting the binding of IL-23 to its (cognate) receptor, for example in the alpha-screen assay of Example 19 or 22), and/or of modulating, neutralizing, blocking and/or inhibiting the binding of IL-12 to its (cognate) receptor) and “p40− sequences” (i.e. p40 sequences that are directed against the p40 subunit but that (per se/as such) are (essentially) not capable of modulating, neutralizing, blocking and/or inhibiting the binding of a heterodimeric cytokine comprising a p40 subunit to its (cognate) receptor);
[0060] “p35 sequences”, i.e. amino acid sequences of the invention that are directed against (as defined herein) the p35 subunit (as present in for example IL-12);
[0061] “IL-27 sequences”, i.e. amino acid sequences of the invention that are directed against (as defined herein) IL-27. The IL-27 sequences described herein may be directed against the EBI-3 subunit or against the IL-27p28 subunit;
[0062] “IL-12Rb1 sequences”, i.e. amino acid sequences of the invention that are directed against the Rbeta1 subunit of IL-12R and/or of IL-23R;
[0063] “IL-2Rb2 sequences”, i.e. amino acid sequences of the invention that are directed against the Rbeta2 subunit of IL-12R)
[0064] “IL-23R sequences”, i.e. amino acid sequences of the invention that are directed against the IL-23R subunit of the IL-23 receptor.

[0065] Each of the p19+sequences, p19− sequences, p40+sequences, p40− sequence, p35 sequences, IL-27 sequences, IL-12Rb1 sequences, IL-12Rb2 sequences and IL-23R sequences may be as further described herein and each class of amino acid sequences of the invention forms a further aspect of the invention.

[0066] The invention also relates to the use of such p19+ sequences, p19− sequences, p40+ sequences, p40− sequences, p35 sequences, IL-27 sequences, IL-12Rb1 sequences, IL-12Rb2 sequences and IL-23R sequences (and/or of nucleotide sequences and/or nucleic acids encoding the same) as “building blocks” (i.e. as single antigen binding domains or units) in or for multivalent, multispecific and/or multiparatopic constructs, as further described herein.

[0067] In this respect, it should for example be noted that amino acid sequences of the invention that are not capable of modulating, neutralizing, blocking and/or inhibiting the binding of a heterodimeric cytokine to its cognate receptor (such as the p19− sequences or p40− sequences) may still find use as binding domains and/or binding units in multivalent, multispecific and/or multiparatopic polypeptides of the invention, for example in order to provide/improve specificity and/or to provide/improve affinity and/or avidity. Examples thereof will become clear to the skilled person from the disclosure herein.

[0068] Thus, further aspects of the invention relate to:
[0069] the use of an amino acid sequence of the invention that comprises or essentially consists of a single binding domain or binding unit (as defined herein) in providing, constructing, and/or as part of a multivalent, multispecific and/or multiparatopic construct, protein and/or polypeptide that comprises said amino acid sequence of the invention (one or more) and at least one further binding domain or binding unit;
[0070] the use of a nucleotide sequence and/or nucleic acid that encodes an amino acid sequence of the invention that comprises or essentially consists of a single binding domain or binding unit (as defined herein) in providing, constructing, and/or as part of a nucleotide sequence and/or nucleic acid that encodes a multivalent, multispecific and/or multiparatopic construct, protein and/or polypeptide that comprises said amino acid sequence of the invention (one or more) and at least one further binding domain or binding unit;
[0071] the use of an amino acid sequence of the invention that comprises or essentially consists of a single binding domain or binding unit (as defined herein) in providing, constructing, and/or as part of a biparatopic construct, protein and/or polypeptide that comprises said amino acid sequence of the invention (one or more) and at least one further binding domain or binding unit;
[0072] the use of a nucleotide sequence and/or nucleic acid that encodes an amino acid sequence of the invention that comprises or essentially consists of a single binding domain or binding unit (as defined herein) in providing, constructing, and/or as part of a nucleotide sequence and/or nucleic acid that encodes a biparatopic construct, protein and/or polypeptide that comprises said amino acid sequence of the invention (one or more) and at least one further binding domain or binding unit;
[0073] the use of an amino acid sequence of the invention that comprises or essentially consists of a single binding domain or binding unit (as defined herein) in providing, constructing, and/or as part of a multispecific (and in particular, bispecific) construct, protein and/or polypeptide that is directed against a heterodimeric protein, polypeptide, ligand or receptor (or other heterodimeric “target”), wherein said construct, protein and/or polypeptide comprises said amino acid sequence of the invention (one or more) and at least one further binding domain or binding unit, and wherein said one or more amino acid sequences of the invention are directed against a first subunit of the heterodimeric protein, polypeptide, ligand or receptor and at least one of said further binding domains or binding units is directed against a second subunit of the heterodimeric protein, polypeptide, ligand or receptor different from the first;
[0074] the use of a nucleotide sequence and/or nucleic acid that encodes an amino acid sequence of the invention that comprises or essentially consists of a single binding domain or binding unit (as defined herein) in providing, constructing, and/or as part of a nucleotide sequence and/or nucleic acid that encodes a multispecific (and in particular, bispecific) construct, protein and/or polypeptide that is directed against a heterodimeric protein, polypeptide, ligand or receptor (or other heterodimeric “target”), wherein said construct, protein and/or polypeptide comprises said amino acid sequence of the invention (one or more) and at least one further binding domain or binding unit, and wherein said one or more amino acid sequences of the invention are directed against a first subunit of the heterodimeric protein, polypeptide, ligand or receptor and at least one of said further binding domains or binding units is directed against a second subunit of the heterodimeric protein, polypeptide, ligand or receptor different from the first;
[0075] the use of an amino acid sequence of the invention that comprises or essentially consists of a single binding domain or binding unit (as defined herein) in providing, constructing and/or as part of a multivalent, multispecific and/or multiparatopic construct, protein and/or polypeptide that is directed against a heterodimeric cytokine or a (cognate) receptor for a heterodimeric cytokine and that comprises said amino acid sequence of the invention and at least one further binding domain or binding unit;
[0076] the use of a nucleotide sequence and/or nucleic acid that encodes an amino acid sequence of the invention that comprises or essentially consists of a single binding domain or binding unit (as defined herein) in providing, constructing and/or as part of a nucleotide sequence and/or nucleic acid that encodes a multivalent, multispecific and/or multiparatopic construct, protein and/or polypeptide that is directed against a heterodimeric cytokine or a (cognate) receptor for a heterodimeric cytokine and that comprises said amino acid sequence of the invention and at least one further binding domain or binding unit;
[0077] the use of an amino acid sequence of the invention that comprises or essentially consists of a single binding domain or binding unit (as defined herein) in providing, constructing and/or as part of a biparatopic construct, protein and/or polypeptide that is directed against (a subunit of) a heterodimeric cytokine or (a subunit of) a (cognate) receptor for a heterodimeric cytokine and that comprises said amino acid sequence of the invention and at least one further binding domain or binding unit;
[0078] the use of a nucleotide sequence and/or nucleic acid that encodes an amino acid sequence of the invention that comprises or essentially consists of a single binding domain or binding unit (as defined herein) in providing, constructing and/or as part of a nucleotide sequence and/or nucleic acid that encodes a biparatopic construct, protein and/or polypeptide that is directed against (a subunit of) a heterodimeric cytokine or (a subunit of) a (cognate) receptor for a heterodimeric cytokine and that comprises said amino acid sequence of the invention and at least one further binding domain or binding unit;
[0079] the use of an amino acid sequence of the invention that comprises or essentially consists of a single binding domain or binding unit (as defined herein) in providing, constructing, and/or as part of a multispecific (and in particular, bispecific) construct, protein and/or polypeptide that is directed against a heterodimeric cytokine, wherein said construct, protein and/or polypeptide comprises said amino acid sequence of the invention (one or more) and at least one further binding domain or binding unit, and wherein said one or more amino acid sequences of the invention are directed against a first subunit of the heterodimeric cytokine and at least one of said further binding domains or binding units is directed against a second subunit of the same heterodimeric cytokine (i.e. different from the first subunit);
[0080] the use of a nucleotide sequence and/or nucleic acid that encodes an amino acid sequence of the invention that comprises or essentially consists of a single binding domain or binding unit (as defined herein) in providing, constructing, and/or as part of a nucleotide sequence and/or nucleic acid that encodes a multispecific (and in particular, bispecific) construct, protein and/or polypeptide that is directed against a heterodimeric cytokine, wherein said construct, protein and/or polypeptide comprises said amino acid sequence of the invention (one or more) and at least one further binding domain or binding unit, and wherein said one or more amino acid sequences of the invention are directed against a first subunit of the heterodimeric cytokine and at least one of said further binding domains or binding units is directed against a second subunit of the same heterodimeric cytokine (i.e. different from the first subunit); the use of a p19+ sequence (as defined herein) in providing, constructing, and/or as part of a multivalent, multispecific and/or multiparatopic construct, protein and/or polypeptide that comprises said p19+ sequence (one or more) and one or more further binding domains or binding units;
[0081] the use of a nucleotide sequence and/or nucleic acid that encodes a p19+ sequence (as defined herein) in providing, constructing, and/or as part of a nucleotide sequence and/or nucleic acid that encodes a multivalent, multispecific and/or multiparatopic construct, protein and/or polypeptide that comprises said p19+ sequence (one or more) and one or more further binding domains or binding units;
[0082] the use of a p19+ sequence (as defined herein) in providing, constructing, and/or as part of a biparatopic construct, protein and/or polypeptide that is directed against p19 and/or against a heterodimeric cytokine that comprises a p19 subunit (such as IL-23) and that comprises said p19+ sequence (one or more) and at least one further binding domain or binding unit that is also directed against p19 (but to a different epitope or antigenic determinant of p19), and optionally one or more further binding domains or binding units;
[0083] the use of a nucleotide sequence and/or nucleic acid that encodes a p19+ sequence (as defined herein) in providing, constructing, and/or as part of a nucleotide sequence and/or nucleic acid that encodes a biparatopic construct, protein and/or polypeptide that is directed against p19 and/or against a heterodimeric cytokine that comprises a p19 subunit (such as IL-23) and that comprises said p19+ sequence (one or more) and at least one further binding domain or binding unit that is also directed against p19 (but to a different epitope or antigenic determinant of p19), and optionally one or more further binding domains or binding units;
[0084] the use of a p19+ sequence (as defined herein) in providing, constructing, and/or as part of a multispecific (and in particular, bispecific) construct, protein and/or polypeptide that is directed against a heterodimeric cytokine that comprises a p19 subunit (such as IL-23), wherein said construct, protein and/or polypeptide comprises said p19+ sequence (one or more) and one or more further binding domains or binding units, and wherein at least one of said further binding domains or binding units is directed against a second subunit of the said heterodimeric cytokine different from p19 (such as p40 in IL-23);
[0085] the use of a nucleotide sequence and/or nucleic acid that encodes a p19+ sequence (as defined herein) in providing, constructing, and/or as part of a nucleotide sequence and/or nucleic acid that encodes a multispecific (and in particular, bispecific) construct, protein and/or polypeptide that is directed against a heterodimeric cytokine that comprises a p19 subunit (such as IL-23), wherein said construct, protein and/or polypeptide comprises said p19+ sequence (one or more) and one or more further binding domains or binding units, and wherein at least one of said further binding domains or binding units is directed against a second subunit of the said heterodimeric cytokine different from p19 (such as p40 in IL-23);
[0086] the use of a p19− sequence (as defined herein) in providing, constructing, and/or as part of a multivalent, multispecific and/or multiparatopic construct, protein and/or polypeptide that comprises said p19− sequence (one or more) and one or more further binding domains or binding units;
[0087] the use of a nucleotide sequence and/or nucleic acid that encodes a p19− sequence (as defined herein) in providing, constructing, and/or as part of a nucleotide sequence and/or nucleic acid that encodes a multivalent, multispecific and/or multiparatopic construct, protein and/or polypeptide that comprises said p19− sequence (one or more) and one or more further binding domains or binding units;
[0088] the use of a p19− sequence (as defined herein) in providing, constructing, and/or as part of a biparatopic construct, protein and/or polypeptide that is directed against p19 and/or against a heterodimeric cytokine that comprises a p19 subunit (such as IL-23) and that comprises said p19− sequence (one or more) and at least one further binding domain or binding unit that is also directed against p19 (but to a different epitope or antigenic determinant of p19), and optionally one or more further binding domains or binding units;
[0089] the use of a nucleotide sequence and/or nucleic acid that encodes a p19− sequence (as defined herein) in providing, constructing, and/or as part of a nucleotide sequence and/or nucleic acid that encodes a biparatopic construct, protein and/or polypeptide that is directed against p19 and/or against a heterodimeric cytokine that comprises a p19 subunit (such as IL-23) and that comprises said p19− sequence (one or more) and at least one further binding domain or binding unit that is also directed against p19 (but to a different epitope or antigenic determinant of p19), and optionally one or more further binding domains or binding units;
[0090] the use of a p19− sequence (as defined herein) in providing, constructing, and/or as part of a multispecific (and in particular, bispecific) construct, protein and/or polypeptide that is directed against a heterodimeric cytokine that comprises a p19 subunit (such as IL-23), wherein said construct, protein and/or polypeptide comprises said p19− sequence (one or more) and one or more further binding domains or binding units, and wherein at least one of said further binding domains or binding units is directed against a second subunit of the said heterodimeric cytokine different from p19 (such as p40 in IL-23);
[0091] the use of a nucleotide sequence and/or nucleic acid that encodes a p19− sequence (as defined herein) in providing, constructing, and/or as part of a nucleotide sequence and/or nucleic acid that encodes a multispecific (and in particular, bispecific) construct, protein and/or polypeptide that is directed against a heterodimeric cytokine that comprises a p19 subunit (such as IL-23), wherein said construct, protein and/or polypeptide comprises said p19− sequence (one or more) and one or more further binding domains or binding units, and wherein at least one of said further binding domains or binding units is directed against a second subunit of the said heterodimeric cytokine different from p19 (such as p40 in IL-23);
[0092] the use of a p40+sequence (as defined herein) in providing, constructing, and/or as part of a multivalent, multispecific and/or multiparatopic construct, protein and/or polypeptide that comprises said p40+sequence (one or more) and one or more further binding domains or binding units;
[0093] the use of a nucleotide sequence and/or nucleic acid that encodes a p40+ sequence (as defined herein) in providing, constructing, and/or as part of a nucleotide sequence and/or nucleic acid that encodes a multivalent, multispecific and/or multiparatopic construct, protein and/or polypeptide that comprises said p40+ sequence (one or more) and one or more further binding domains or binding units;
[0094] the use of a p40+ sequence (as defined herein) in providing, constructing, and/or as part of a biparatopic construct, protein and/or polypeptide that is directed against p40 and/or against a heterodimeric cytokine that comprises a p40 subunit (such as IL-23 or IL-12) and that comprises said p40+ sequence (one or more) and at least one further binding domain or binding unit that is also directed against p40 (but to a different epitope or antigenic determinant of p40), and optionally one or more further binding domains or binding units;
[0095] the use of a nucleotide sequence and/or nucleic acid that encodes a p40+ sequence (as defined herein) in providing, constructing, and/or as part of a nucleotide sequence and/or nucleic acid that encodes a biparatopic construct, protein and/or polypeptide that is directed against p40 and/or against a heterodimeric cytokine that comprises a p40 subunit (such as IL-23) and that comprises said p40+ sequence (one or more) and at least one further binding domain or binding unit that is also directed against p40 (but to a different epitope or antigenic determinant of p40), and optionally one or more further binding domains or binding units;
[0096] the use of a p40+ sequence (as defined herein) in providing, constructing, and/or as part of a multispecific (and in particular, bispecific) construct, protein and/or polypeptide that is directed against a heterodimeric cytokine that comprises a p40 subunit (such as IL-23), wherein said construct, protein and/or polypeptide comprises said p40+ sequence (one or more) and one or more further binding domains or binding units, and wherein at least one of said further binding domains or binding units is directed against a second subunit of the said heterodimeric cytokine different from p40 (such as p19 in IL-23 or p35 in IL-12);
[0097] the use of a nucleotide sequence and/or nucleic acid that encodes a p40+ sequence (as defined herein) in providing, constructing, and/or as part of a nucleotide sequence and/or nucleic acid that encodes a multispecific (and in particular, bispecific) construct, protein and/or polypeptide that is directed against a heterodimeric cytokine that comprises a p40 subunit (such as IL-23 or IL-12), wherein said construct, protein and/or polypeptide comprises said p40+ sequence (one or more) and one or more further binding domains or binding units, and wherein at least one of said further binding domains or binding units is directed against a second subunit of the said heterodimeric cytokine different from p40 (such as p40 in IL-23 or p35 in IL-12);
[0098] the use of a p40− sequence (as defined herein) in providing, constructing, and/or as part of a multivalent, multispecific and/or multiparatopic construct, protein and/or polypeptide that comprises said p40− sequence (one or more) and one or more further binding domains or binding units;
[0099] the use of a nucleotide sequence and/or nucleic acid that encodes a p40− sequence (as defined herein) in providing, constructing, and/or as part of a nucleotide sequence and/or nucleic acid that encodes a multivalent, multispecific and/or multiparatopic construct, protein and/or polypeptide that comprises said p40− sequence (one or more) and one or more further binding domains or binding units;
[0100] the use of a p40− sequence (as defined herein) in providing, constructing, and/or as part of a biparatopic construct, protein and/or polypeptide that is directed against p40 and/or against a heterodimeric cytokine that comprises a p40 subunit (such as IL-23 or IL-12) and that comprises said p40− sequence (one or more) and at least one further binding domain or binding unit that is also directed against p40 (but to a different epitope or antigenic determinant of p40), and optionally one or more further binding domains or binding units;
[0101] the use of a nucleotide sequence and/or nucleic acid that encodes a p40− sequence (as defined herein) in providing, constructing, and/or as part of a nucleotide sequence and/or nucleic acid that encodes a biparatopic construct, protein and/or polypeptide that is directed against p40 and/or against a heterodimeric cytokine that comprises a p40 subunit (such as IL-23 or IL-12) and that comprises said p40− sequence (one or more) and at least one further binding domain or binding unit that is also directed against p40 (but to a different epitope or antigenic determinant of p40), and optionally one or more further binding domains or binding units;
[0102] the use of a p40− sequence (as defined herein) in providing, constructing, and/or as part of a multispecific (and in particular, bispecific) construct, protein and/or polypeptide that is directed against a heterodimeric cytokine that comprises a p40 subunit (such as IL-23 or IL-12), wherein said construct, protein and/or polypeptide comprises said p40− sequence (one or more) and one or more further binding domains or binding units, and wherein at least one of said further binding domains or binding units is directed against a second subunit of the said heterodimeric cytokine different from p40 (such as p19 in IL-23 or p35 in IL-12);
[0103] the use of a nucleotide sequence and/or nucleic acid that encodes a p40− sequence (as defined herein) in providing, constructing, and/or as part of a nucleotide sequence and/or nucleic acid that encodes a multispecific (and in particular, bispecific) construct, protein and/or polypeptide that is directed against a heterodimeric cytokine that comprises a p40 subunit (such as IL-23 or IL-12), wherein said construct, protein and/or polypeptide comprises said p40− sequence (one or more) and one or more further binding domains or binding units, and wherein at least one of said further binding domains or binding units is directed against a second subunit of the said heterodimeric cytokine different from p40 (such as p40 in IL-23 or p35 in IL-12);
[0104] the use of a p35 sequence (as defined herein) in providing, constructing, and/or as part of a multivalent, multispecific and/or multiparatopic construct, protein and/or polypeptide that comprises said p35 sequence (one or more) and one or more further binding domains or binding units;
[0105] the use of a nucleotide sequence and/or nucleic acid that encodes a p35 sequence (as defined herein) in providing, constructing, and/or as part of a nucleotide sequence and/or nucleic acid that encodes a multivalent, multispecific and/or multiparatopic construct, protein and/or polypeptide that comprises said p35 sequence (one or more) and one or more further binding domains or binding units;
[0106] the use of a p35 sequence (as defined herein) in providing, constructing, and/or as part of a biparatopic construct, protein and/or polypeptide that is directed against p35 and/or against a heterodimeric cytokine that comprises a p35 subunit (such as IL-12) and that comprises said p35 sequence (one or more) and at least one further binding domain or binding unit that is also directed against p35 (but to a different epitope or antigenic determinant of p35), and optionally one or more further binding domains or binding units;
[0107] the use of a nucleotide sequence and/or nucleic acid that encodes a p35 sequence (as defined herein) in providing, constructing, and/or as part of a nucleotide sequence and/or nucleic acid that encodes a biparatopic construct, protein and/or polypeptide that is directed against p35 and/or against a heterodimeric cytokine that comprises a p35 subunit (such as IL-12) and that comprises said p35 sequence (one or more) and at least one further binding domain or binding unit that is also directed against p35 (but to a different epitope or antigenic determinant of p35), and optionally one or more further binding domains or binding units;
[0108] the use of a p35 sequence (as defined herein) in providing, constructing, and/or as part of a multispecific (and in particular, bispecific) construct, protein and/or polypeptide that is directed against a heterodimeric cytokine that comprises a p35 subunit (such as

[0109] IL-12), wherein said construct, protein and/or polypeptide comprises said p35 sequence (one or more) and one or more further binding domains or binding units, and wherein at least one of said further binding domains or binding units is directed against a second subunit of the said heterodimeric cytokine different from p35 (such as p40 in IL-12);
[0110] the use of a nucleotide sequence and/or nucleic acid that encodes a p35 sequence (as defined herein) in providing, constructing, and/or as part of a nucleotide sequence and/or nucleic acid that encodes a multispecific (and in particular, bispecific) construct, protein and/or polypeptide that is directed against a heterodimeric cytokine that comprises a p35 subunit (such as IL-12), wherein said construct, protein and/or polypeptide comprises said p35 sequence (one or more) and one or more further binding domains or binding units, and wherein at least one of said further binding domains or binding units is directed against a second subunit of the said heterodimeric cytokine different from p35 (such as p40 in IL-12);
[0111] the use of an IL-27 sequence (as defined herein) in providing, constructing, and/or as part of a multivalent, multispecific and/or multiparatopic construct, protein and/or polypeptide that comprises said IL-27 sequence (one or more) and one or more further binding domains or binding units;
[0112] the use of a nucleotide sequence and/or nucleic acid that encodes an IL-27 sequence (as defined herein) in providing, constructing, and/or as part of a nucleotide sequence and/or nucleic acid that encodes a multivalent, multispecific and/or multiparatopic construct, protein and/or polypeptide that comprises said IL-27 sequence (one or more) and one or more further binding domains or binding units;
[0113] the use of an IL-27 sequence (as defined herein) in providing, constructing, and/or as part of a biparatopic construct, protein and/or polypeptide that is directed against IL-27 and that comprises said IL-27 sequence (one or more) and at least one further binding domain or binding unit that is also directed against IL-27 (but to a different epitope or antigenic determinant of IL-27), and optionally one or more further binding domains or binding units;
[0114] the use of a nucleotide sequence and/or nucleic acid that encodes a IL-27 sequence (as defined herein) in providing, constructing, and/or as part of a nucleotide sequence and/or nucleic acid that encodes a biparatopic construct, protein and/or polypeptide that is directed against IL-27 and that comprises said IL-27 sequence (one or more) and at least one further binding domain or binding unit that is also directed against IL-27 (but to a different epitope or antigenic determinant of IL-27), and optionally one or more further binding domains or binding units;
[0115] the use of an IL-27 sequence (as defined herein) in providing, constructing, and/or as part of a multispecific (and in particular, bispecific) construct, protein and/or polypeptide that is directed against IL-27, wherein said construct, protein and/or polypeptide comprises said IL-27 sequence (one or more) and one or more further binding domains or binding units, and wherein at least one of said further binding domains or binding units is directed against a another subunit of IL-27 different from the subunit against which said IL-27 sequence is directed;
[0116] the use of a nucleotide sequence and/or nucleic acid that encodes an IL-27 sequence (as defined herein) in providing, constructing, and/or as part of a nucleotide sequence and/or nucleic acid that encodes a multispecific (and in particular, bispecific) construct, protein and/or polypeptide that is directed against IL-27, wherein said construct, protein and/or polypeptide comprises said IL-27 sequence (one or more) and one or more further binding domains or binding units, and wherein at least one of said further binding domains or binding units is directed against another subunit of IL-27 different from the subunit against which said IL-27 sequence is directed;
[0117] the use of an IL-12RB1 sequence (as defined herein) in providing, constructing, and/or as part of a multivalent, multispecific and/or multiparatopic construct, protein and/or polypeptide that comprises said IL-12RB1 sequence (one or more) and one or more further binding domains or binding units;
[0118] the use of a nucleotide sequence and/or nucleic acid that encodes an IL-12RB1 sequence (as defined herein) in providing, constructing, and/or as part of a nucleotide sequence and/or nucleic acid that encodes a multivalent, multispecific and/or multiparatopic construct, protein and/or polypeptide that comprises said IL-12RB1 sequence (one or more) and one or more further binding domains or binding units;
[0119] the use of an IL-12RB1 sequence (as defined herein) in providing, constructing, and/or as part of a biparatopic construct, protein and/or polypeptide that is directed against IL-12RB1 and/or against a receptor that comprises an IL-12Rb1 subunit (such as the cognate receptors for IL-12 and IL-23) and that comprises said IL-12RB1 sequence (one or more) and at least one further binding domain or binding unit that is also directed against IL-12RB1 (but to a different epitope or antigenic determinant of IL-12RB1), and optionally one or more further binding domains or binding units;
[0120] the use of a nucleotide sequence and/or nucleic acid that encodes a IL-12RB1 sequence (as defined herein) in providing, constructing, and/or as part of a nucleotide sequence and/or nucleic acid that encodes a biparatopic construct, protein and/or polypeptide that is directed against IL-12RB1 and/or against a receptor that comprises an IL-12Rb1 subunit (such as the cognate receptors for IL-12 and IL-23) and that comprises said IL-12RB1 sequence (one or more) and at least one further binding domain or binding unit that is also directed against IL-12RB1 (but to a different epitope or antigenic determinant of IL-12RB1), and optionally one or more further binding domains or binding units;
[0121] the use of an IL-12RB1 sequence (as defined herein) in providing, constructing, and/or as part of a multispecific (and in particular, bispecific) construct, protein and/or polypeptide that is directed against a heterodimeric receptor that comprises an IL-12RB1 subunit (such as the cognate receptors for IL-12 and IL-23), wherein said construct, protein and/or polypeptide comprises said IL-12RB1 sequence (one or more) and one or more further binding domains or binding units, and wherein at least one of said further binding domains or binding units are directed against another subunit of said heterodimeric receptor different from IL-12RB1;
[0122] the use of a nucleotide sequence and/or nucleic acid that encodes an IL-12RB1 sequence (as defined herein) in providing, constructing, and/or as part of a nucleotide sequence and/or nucleic acid that encodes a multispecific (and in particular, bispecific) construct, protein and/or polypeptide that is directed against a heterodimeric receptor that comprises an IL-12RB1 subunit (such as the cognate receptors for IL-12 and IL-23), wherein said construct, protein and/or polypeptide comprises said IL-12RB1 sequence (one or more) and one or more further binding domains or binding units, and wherein at least one of said further binding domains or binding units are directed against another subunit of said heterodimeric receptor different from IL-12RB1;
[0123] the use of an IL-12RB2 sequence (as defined herein) in providing, constructing, and/or as part of a multivalent, multispecific and/or multiparatopic construct, protein and/or polypeptide that comprises said IL-12RB2 sequence (one or more) and one or more further binding domains or binding units;
[0124] the use of a nucleotide sequence and/or nucleic acid that encodes an IL-12RB2 sequence (as defined herein) in providing, constructing, and/or as part of a nucleotide sequence and/or nucleic acid that encodes a multivalent, multispecific and/or multiparatopic construct, protein and/or polypeptide that comprises said IL-12RB2 sequence (one or more) and one or more further binding domains or binding units;
[0125] the use of an IL-12RB2 sequence (as defined herein) in providing, constructing, and/or as part of a biparatopic construct, protein and/or polypeptide that is directed against IL-12RB2 and/or against a receptor that comprises an IL-12Rb2 subunit (such as the cognate receptor for IL-12) and that comprises said IL-12RB2 sequence (one or more) and at least one further binding domain or binding unit that is also directed against IL-12RB2 (but to a different epitope or antigenic determinant of IL-12RB2), and optionally one or more further binding domains or binding units;
[0126] the use of a nucleotide sequence and/or nucleic acid that encodes a IL-12RB2 sequence (as defined herein) in providing, constructing, and/or as part of a nucleotide sequence and/or nucleic acid that encodes a biparatopic construct, protein and/or polypeptide that is directed against IL-12RB2 and/or against a receptor that comprises an IL-12Rb2 subunit (such as the cognate receptor for IL-12) and that comprises said IL-12RB2 sequence (one or more) and at least one further binding domain or binding unit that is also directed against IL-12RB2 (but to a different epitope or antigenic determinant of IL-12RB2), and optionally one or more further binding domains or binding units;
[0127] the use of an IL-12RB2 sequence (as defined herein) in providing, constructing, and/or as part of a multispecific (and in particular, bispecific) construct, protein and/or polypeptide that is directed against a heterodimeric receptor that comprises an IL-12RB2 subunit (such as the cognate receptor for IL-12), wherein said construct, protein and/or polypeptide comprises said IL-12RB2 sequence (one or more) and one or more further binding domains or binding units, and wherein at least one of said further binding domains or binding units are directed against another subunit of said heterodimeric receptor different from IL-12RB2;
[0128] the use of a nucleotide sequence and/or nucleic acid that encodes an IL-12RB2 sequence (as defined herein) in providing, constructing, and/or as part of a nucleotide sequence and/or nucleic acid that encodes a multispecific (and in particular, bispecific) construct, protein and/or polypeptide that is directed against a heterodimeric receptor that comprises an IL-12RB2 subunit (such as the cognate receptor for IL-12), wherein said construct, protein and/or polypeptide comprises said IL-12RB2 sequence (one or more) and one or more further binding domains or binding units, and wherein at least one of said further binding domains or binding units are directed against another subunit of said heterodimeric receptor different from IL-12RB2;
[0129] the use of an IL-23R sequence (as defined herein) in providing, constructing, and/or as part of a multivalent, multispecific and/or multiparatopic construct, protein and/or polypeptide that comprises said IL-23R sequence (one or more) and one or more further binding domains or binding units;
[0130] the use of a nucleotide sequence and/or nucleic acid that encodes an IL-23R sequence (as defined herein) in providing, constructing, and/or as part of a nucleotide sequence and/or nucleic acid that encodes a multivalent, multispecific and/or multiparatopic construct, protein and/or polypeptide that comprises said IL-23R sequence (one or more) and one or more further binding domains or binding units;
[0131] the use of an IL-23R sequence (as defined herein) in providing, constructing, and/or as part of a biparatopic construct, protein and/or polypeptide that is directed against IL-23R and/or against a receptor that comprises an IL-23R subunit (such as the cognate receptor for IL-23) and that comprises said IL-23R sequence (one or more) and at least one further binding domain or binding unit that is also directed against IL-23R (but to a different epitope or antigenic determinant of IL-23R), and optionally one or more further binding domains or binding units;
[0132] the use of a nucleotide sequence and/or nucleic acid that encodes a IL-23R sequence (as defined herein) in providing, constructing, and/or as part of a nucleotide sequence and/or nucleic acid that encodes a biparatopic construct, protein and/or polypeptide that is directed against IL-23R and/or against a receptor that comprises an IL-23R subunit (such as the cognate receptor for IL-23) and that comprises said IL-23R sequence (one or more) and at least one further binding domain or binding unit that is also directed against IL-23R (but to a different epitope or antigenic determinant of IL-23R), and optionally one or more further binding domains or binding units;
[0133] the use of an IL-23R sequence (as defined herein) in providing, constructing, and/or as part of a multispecific (and in particular, bispecific) construct, protein and/or polypeptide that is directed against a heterodimeric receptor that comprises an IL-23R subunit (such as the cognate receptor for IL-23), wherein said construct, protein and/or polypeptide comprises said IL-23R sequence (one or more) and one or more further binding domains or binding units, and wherein at least one of said further binding domains or binding units are directed against another subunit of said heterodimeric receptor different from IL-23R;
[0134] the use of a nucleotide sequence and/or nucleic acid that encodes an IL-23R sequence (as defined herein) in providing, constructing, and/or as part of a nucleotide sequence and/or nucleic acid that encodes a multispecific (and in particular, bispecific) construct, protein and/or polypeptide that is directed against a heterodimeric receptor that comprises an IL-23R subunit (such as the cognate receptor for IL-23), wherein said construct, protein and/or polypeptide comprises said IL-23R sequence (one or more) and one or more further binding domains or binding units, and wherein at least one of said further binding domains or binding units are directed against another subunit of said heterodimeric receptor different from IL-23R.

[0135] Where any of the above aspects/uses comprises the use of a nucleotide sequence and/or nucleic acid that encodes a monovalent amino acid sequence in in providing, constructing, and/or as part of a nucleotide sequence and/or nucleic acid that encodes a multivalent, multispecific and/or multiparatopic constructs (such as a biparatopic construct), said aspect/use optionally further comprises the use of the a nucleotide sequence and/or nucleic acid thus obtained in preparing (e.g. by suitable expression, as further described herein) the multivalent, multispecific and/or multiparatopic construct encoded by said nucleotide sequence and/or nucleic acid.

[0136] More generally, in one aspect of the invention, there is provided a (“multispecific”, as defined herein) polypeptide construct that is directed against (as defined herein) a heterodimeric protein, polypeptide, ligand or receptor (or other “target”) that comprises:
[0137] at least a first subunit;
[0138] and
[0139] at least a second subunit;
[0140] wherein said polypeptide construct at least comprises a first binding domain or binding unit that is directed against said first subunit and a second binding domain or binding unit that is directed against said second subunit.

[0141] In particular, in this aspect of the invention, there is provided a (“multispecific”, as defined herein) polypeptide construct that is directed against (as defined herein) a first heterodimeric protein, polypeptide, ligand or receptor that comprises:
[0142] at least a first subunit that is shared between said first heterodimeric protein, polypeptide, ligand or receptor and at least a second, different heterodimeric protein, polypeptide, ligand or receptor;
[0143] and
[0144] at least a second subunit that is not shared between said first heterodimeric protein, polypeptide, ligand or receptor and said second, different heterodimeric protein, polypeptide, ligand or receptor;
[0145] wherein said polypeptide construct at least comprises a first binding domain or binding unit that is directed against said first (i.e. shared) subunit and a second binding domain or binding unit that is directed against said second (i.e. not shared) subunit.

[0146] In another aspect of the invention, there is provided a polypeptide construct that is directed against (as defined herein) a heterodimeric protein, polypeptide, ligand or receptor (or other “target”) that comprises:
[0147] at least a first subunit;
[0148] and
[0149] at least a second subunit;
[0150] wherein said polypeptide construct is a (biparatopic—as defined herein) construct that at least comprises a first binding domain or binding unit that is directed against said first subunit and a second binding domain or binding unit different from said first binding domain or binding unit that is also directed against said first subunit, but against a different epitope, antigenic determinant or binding site on said first subunit.

[0151] In another aspect of the invention, there is provided a polypeptide construct that is directed against (as defined herein) a heterodimeric protein that is a ligand for a receptor and that comprises:
[0152] at least a first subunit;
[0153] and
[0154] at least a second subunit;
[0155] wherein said polypeptide construct is a (biparatopic—as defined herein) construct that at least comprises a first binding domain or binding unit that is directed against said first subunit and a second binding domain or binding unit different from said first binding domain or binding unit that is also directed against said first subunit, but against a different epitope, antigenic determinant or binding site on said first subunit. In particular, but without limitation, in such a (biparatopic) construct, the first binding domain or binding unit may be such that it modulates (as defined herein), blocks, inhibits and/or neutralizes the binding of said heterodimeric protein to its (cognate) receptor, and the second binding domain or binding unit may be such that it essentially does not modulate (as defined herein), block, inhibit and/or neutralize the binding of said heterodimeric protein to its (cognate) receptor (or visa versa).

[0156] In another aspect of the invention, there is provided a polypeptide construct that is directed against (as defined herein) a heterodimeric protein that is a ligand for a receptor and that comprises:
[0157] at least a first subunit that is shared between said first heterodimeric protein, polypeptide, ligand or receptor and at least a second, different heterodimeric protein, polypeptide, ligand or receptor;
[0158] and
[0159] at least a second subunit that is not shared between said first heterodimeric protein, polypeptide, ligand or receptor and said second, different heterodimeric protein, polypeptide, ligand or receptor;
[0160] wherein said polypeptide construct is a (biparatopic—as defined herein) construct that at least comprises a first binding domain or binding unit that is directed against said second (i.e. not shared) subunit and a second binding domain or binding unit different from said first binding domain or binding unit that is also directed against said second (i.e. not shared) subunit, but against a different epitope, antigenic determinant or binding site on said second subunit. In particular, but without limitation, in such a (biparatopic) construct, the first binding domain or binding unit may be such that it modulates (as defined herein), blocks, inhibits and/or neutralizes the binding of said heterodimeric protein to its (cognate) receptor, and the second binding domain or binding unit may be such that it essentially does not modulate (as defined herein), block, inhibit and/or neutralize the binding of said heterodimeric protein to its (cognate) receptor (or visa versa).

[0161] In another aspect of the invention, there is provided a polypeptide construct that is directed against (as defined herein) a heterodimeric protein, polypeptide, ligand or receptor that comprises:
[0162] at least a first subunit;
[0163] and
[0164] at least a second subunit;
[0165] wherein said polypeptide construct is a (biparatopic—as defined herein) construct that at least comprises a first binding domain or binding unit that is directed against said first subunit and a second binding domain or binding unit different from said first binding domain or binding unit that is also directed against said first subunit, but against a different epitope, antigenic determinant or binding site on said first subunit.

[0166] In the above multispecific (and in particular, bispecific) and multiparatopic (and in particular biparatopic) constructs, the first and second binding domain may be as generally described herein (for example, in terms of affinity, specificity etc. for the subunit against which they are directed) for the amino acid sequences of the invention in general. Also, as described herein for the amino acid sequences of the invention, the first, second and optionally further binding domains or binding units present in said constructs are preferably such that they form or are capable of forming (optionally after suitable folding) a single antigen binding domain or antigen binding unit, and may for example be amino acid sequences that comprise an immunoglobulin fold, amino acid sequences that are comprises of four framework regions and three CDR's, and may in particular be domain antibodies, single domain antibodies, VHH's, “dAb's” or Nanobodies (all as further described herein), or suitable fragments thereof.

[0167] Suitable heterodimeric “targets” for the above multispecific (and in particular, bispecific) and multiparatopic (and in particular biparatopic) constructs will be clear to the skilled person based on the disclosure herein; as will be the advantages of the use of the above constructs against such targets.

[0168] For example, but without limitation, the heterodimeric protein, polypeptide, ligand or receptor may be a heterodimeric protein that is a ligand for a heterodimeric receptor, and may in particular be a heterodimeric cytokine (for example, IL-12, IL-23, IL-27 or IL-35). Also, for example, the heterodimeric protein, polypeptide, ligand or receptor may be a heterodimeric ligand that is a receptor for a heterodimeric ligand, and may in particular be a receptor for a heterodimeric cytokine (for example, a receptor for IL-12, IL-23, IL-27 or IL-35).

[0169] In particular, according to the invention, said heterodimeric protein, ligand or polypeptide may be a heterodimeric cytokine or a (heterodimeric) receptor for a cytokine (and in particular for a heterodimeric cytokine).

[0170] Other uses and advantages of the above constructs will become clear to the skilled person based on the disclosure herein.

[0171] Some preferred, but non-limiting constructs of the invention are:
[0172] a) a construct comprising at least one p19+ sequence (as defined herein) and at least one p19− sequence (as defined herein);
[0173] b) a construct comprising at least one p19+ sequence (as defined herein) and at least one p40+ sequence (as defined herein);
[0174] c) a construct comprising at least one p19+ sequence (as defined herein) and at least one p40− sequence (as defined herein);
[0175] d) a construct comprising at least one p19− sequence (as defined herein) and at least one p40+ sequence (as defined herein);
[0176] e) a construct comprising at least one p35 sequence (as defined herein) and at least one p40+ sequence (as defined herein);
[0177] f) a construct comprising at least one p35 sequence (as defined herein) and at least one p40− sequence (as defined herein);
[0178] g) a construct comprising at least one p40+ sequence (as defined herein) and at least one p40− sequence (as defined herein);
[0179] h) a construct comprising at least two (the same or different) p19− sequences (as defined herein), that is such that it capable (for example, but without limitation, through steric interaction and/or courtesy of the linker(s) present therein) of modulating, neutralizing, blocking and/or inhibiting the binding of a heterodimeric cytokine comprising a p19 subunit to its receptor, and in particular capable of are capable of modulating, neutralizing, blocking and/or inhibiting the binding of IL-23 to IL-23R (for example in the alpha-screen assay of Example 19 or 22)
[0180] i) a construct comprising at least two (the same or different) p40− sequences, that is such that it capable (for example, but without limitation, through steric interaction and/or courtesy of the linker(s) present therein) of modulating, neutralizing, blocking and/or inhibiting the binding of a heterodimeric cytokine comprising a p40 subunit to its receptor, and in particular capable of are capable of modulating, neutralizing, blocking and/or inhibiting the binding of IL-23 to IL-23R (for example in the alpha-screen assay of Example 19 or 22) and/or of modulating, neutralizing, blocking and/or inhibiting the binding of IL-12 to its receptor (for example in the alpha-screen assay of Example 19 or 22);
[0181] j) a construct comprising at least one IL-12Rb1 sequence (as defined herein) and at least one IL-12Rb2 sequence (as defined herein);
[0182] k) a construct comprising at least one IL-12Rb1 sequence (as defined herein) and at least one IL-23R sequence (as defined herein);
   [0183] and such constructs, nucleotide sequences encoding the same, formulations and preparations comprising the same, and their preparation and various uses (all as further described herein) form further aspects of the invention.

[0184] Examples of such constructs (and/or of amino acid sequences of the invention that can be used as binding domains and/or binding units to provide such constructs), as well as possible uses and advantages of the above constructs will become clear to the skilled person based on the disclosure herein. For example, and without limitation:
[0185] the constructs referred to under a) above: (i) will be capable of modulating, neutralizing, blocking and/or inhibiting the binding of a heterodimeric cytokine comprising a p19 subunit to its receptor, and in particular be capable of are capable of modulating, neutralizing, blocking and/or inhibiting the binding of IL-23 to IL-23R (for example in the alpha-screen assay of Example 19 or 22); and/or (ii) will generally be specific for (as defined herein) IL-23 compared to heterodimeric cytokines that do not comprise a p19 subunit (such as IL-12, IL-27 or IL-35); and/or (iii) will bind to p19 with greater avidity and specificity than the corresponding p19+ sequence (or another p19+ sequence) per se; and/or
[0186] the constructs referred to under b), c) and d) above (i) will be capable of modulating, neutralizing, blocking and/or inhibiting the binding of IL-23 to the (cognate) receptor for IL-23 (for example in the alpha-screen assay of Example 19 or 22); and/or (ii) will generally be specific for (as defined herein) IL-23 compared to IL-12 (and are also expected to be specific for IL-23 compared to other heterodimeric cytokines that might comprise a p19 or p40 subunit); and/or (iii) bind to IL-23 with greater avidity and specificity than the corresponding p19+ sequence (or another p19+ sequence) per se; and/or (iv) generally be preferred over similar constructs comprising only p19− sequences and p40− sequences;
[0187] the constructs referred to under e) and f) above: (i) will be capable of modulating, neutralizing, blocking and/or inhibiting the binding of IL-12 to the (cognate) receptor for IL-12 (for example in the alpha-screen assay of Example 19 or 22) ; and/or (ii) will generally be specific for (as defined herein) IL-12 compared to IL-23 (and are also expected to be specific for IL-12 compared to other heterodimeric cytokines that might comprise a p35 or p40 subunit); and/or (iii) bind to IL-12 with greater avidity and specificity than the corresponding p35 sequence (or another p35 sequence) per se;
[0188] the constructs referred to under g) above: (i) will be capable of modulating, neutralizing, blocking and/or inhibiting both the binding of IL-23 to the (cognate) receptor for IL-23 for example in the alpha-screen assay of Example 19 or 22)) as well as binding of IL-12 to the (cognate) receptor for IL-12 (for example in the alpha-screen assay of Example 19 or 22); (ii) will bind to p40 with greater avidity and specificity than the corresponding p40+ sequence (or another p40+ sequence) per se the constructs referred to under h) above: (i) will be capable of modulating, neutralizing, blocking and/or inhibiting the binding of IL-23 to the (cognate) receptor for IL-23 (for example in the alpha-screen assay of Example 19 or 22); and/or (ii) will generally be specific for (as defined herein) IL-23 compared to heterodimeric cytokines that do not comprise a p19 subunit (such as IL-12, IL-27 or IL-35); and/or (iii) bind to IL-23 with greater avidity and specificity than each of the corresponding p19− sequences (or another monomeric p19− sequence or p19+ sequence) per se;
[0189] the constructs referred to under i) above: (i) will be capable of modulating, neutralizing, blocking and/or inhibiting both the binding of IL-23 to the (cognate) receptor for IL-23 (for example in the alpha-screen assay of Example 19 or 22) as well as binding of IL-12 to the (cognate) receptor for IL-12 (for example in the alpha-screen assay of Example 19 or 22); and (ii) bind to p40 with greater avidity and specificity than each of the corresponding p40− sequences (or another monomeric p40− sequences or p40+ sequence) per se;
[0190] the construct referred to under j) above: (i) will be specific for the cognate receptor for IL-12 compared to the cognate receptor for IL-23; and (ii) will bind to the cognate receptor for IL-12 with greater avidity and specificity compared to a monomeric IL-12Rb2 sequence;
[0191] the construct referred to under k) above: (i) will be specific for the cognate receptor for IL-23 compared to the cognate receptor for IL-12; and (ii) will bind to the cognate receptor for IL-23 with greater avidity and specificity compared to a monomeric IL-23R sequence;

[0192] Also, as further described herein, a construct as referred to under j) above: (i) may act as an agonist for the signalling that is mediated by the cognate receptor for IL-12 (in which case, the construct is expected to be specific for the signalling that is mediated by the cognate receptor for IL-12 compared to the signalling that is mediated by the cognate receptor for IL-23 mediated signalling, or may essentially not even be capable of acting as agonist for the signalling that is mediated by the cognate receptor for IL-23); and/or (ii) may be capable of modulating, neutralizing, blocking and/or inhibiting the binding of a IL-12 to its cognate receptor and/or may otherwise be capable of preventing, modulating, neutralizing, blocking and/or inhibiting the receptor-mediated signalling that, without the presence of said construct, would be triggered by binding of IL-12 to its cognate receptor (i.e. act as an antagonist for IL-12 and/or for the signalling that is mediated by the cognate receptor for IL-12), and as such be specific for the cognate receptor for IL-12 compared to the cognate receptor for IL-23 (and/or bind with higher avidity and/or specificity to the cognate receptor for IL-12 compared to the cognate receptor for IL-23).

[0193] Similarly, as further described herein, a construct as referred to under k) above: (i) may act as an agonist for the signalling that is mediated by the cognate receptor for IL-23 (in which case, the construct is expected to be specific for the signalling that is mediated by the cognate receptor for IL-23 compared to the signalling that is mediated by the cognate receptor for IL-12 mediated signalling, or may essentially not even be capable of acting as agonist for the signalling that is mediated by the cognate receptor for IL-12); and/or (ii) may be capable of modulating, neutralizing, blocking and/or inhibiting the binding of a IL-23 to its cognate receptor and/or may otherwise be capable of preventing, modulating, neutralizing, blocking and/or inhibiting the receptor-mediated signalling that, without the presence of said construct, would be triggered by binding of IL-23 to its cognate receptor (i.e. act as an antagonist for IL-23 and/or for the signalling that is mediated by the cognate receptor for IL-23), and as such be specific for the cognate receptor for IL-23 compared to the cognate receptor for IL-12 (and/or bind with higher avidity and/or specificity to the cognate receptor for IL-23 compared to the cognate receptor for IL-12).

[0194] Other applications and uses of the amino acid sequences and polypeptides of the invention will become clear to the skilled person from the further disclosure herein.

[0195] Generally, it is an object of the invention to provide pharmacologically active agents, as well as compositions comprising the same, that can be used in the diagnosis, prevention and/or treatment of diseases and disorders associated with heterodimeric cytokines and their receptors and of the further diseases and disorders mentioned herein; and to provide methods for the diagnosis, prevention and/or treatment of such diseases and disorders that involve the administration and/or use of such agents and compositions.

[0196] In particular, it is an object of the invention to provide such pharmacologically active agents, compositions and/or methods that have certain advantages compared to the agents, compositions and/or methods that are currently used and/or known in the art. These advantages will become clear from the further description below.

[0197] More in particular, it is an object of the invention to provide therapeutic proteins that can be used as pharmacologically active agents, as well as compositions comprising the same, for the diagnosis, prevention and/or treatment of diseases and disorders associated with heterodimeric cytokines and their receptors and of the further diseases and disorders mentioned herein; and to provide methods for the diagnosis, prevention and/or treatment of such diseases and disorders that involve the administration and/or the use of such therapeutic proteins and compositions.

[0198] Accordingly, it is a specific object of the present invention to provide amino acid sequences that are directed against (as defined herein) heterodimeric cytokines and/or their receptors, in particular against heterodimeric cytokines and/or their receptors from a warm-blooded animal, more in particular against heterodimeric cytokines and/or their receptors from a mammal, and especially against human heterodimeric cytokines and/or their receptors; and to provide proteins and polypeptides comprising or essentially consisting of at least one such amino acid sequence.

[0199] In particular, it is a specific object of the present invention to provide such amino acid sequences and such proteins and/or polypeptides that are suitable for prophylactic, therapeutic and/or diagnostic use in a warm-blooded animal, and in particular in a mammal, and more in particular in a human being.

[0200] More in particular, it is a specific object of the present invention to provide such amino acid sequences and such proteins and/or polypeptides that can be used for the prevention, treatment, alleviation and/or diagnosis of one or more diseases, disorders or conditions associated with heterodimeric cytokines and/or their receptors and/or mediated by heterodimeric cytokines and/or their receptors (such as the diseases, disorders and conditions mentioned herein) in a warm-blooded animal, in particular in a mammal, and more in particular in a human being.

[0201] It is also a specific object of the invention to provide such amino acid sequences and such proteins and/or polypeptides that can be used in the preparation of pharmaceutical or veterinary compositions for the prevention and/or treatment of one or more diseases, disorders or conditions associated with and/or mediated by heterodimeric cytokines and/or their receptors (such as the diseases, disorders and conditions mentioned herein) in a warm-blooded animal, in particular in a mammal, and more in particular in a human being.

[0202] In the invention, generally, these objects are achieved by the use of the amino acid sequences, proteins, polypeptides and compositions that are described herein.

[0203] In general, the invention provides amino acid sequences that are directed against (as defined herein) and/or can specifically bind (as defined herein) to heterodimeric cytokines and/or their receptors; as well as compounds and constructs, and in particular proteins and polypeptides, that comprise at least one such amino acid sequence. Said amino acid sequence preferably form and/or essentially consist of a single (antigen) binding domain or binding unit, and/or are capable of forming and/or of functioning as a single (antigen) binding domain or binding unit (optionally after suitable folding), either as such and/or as part of a protein or polypeptide of the invention as further described herein.

[0204] More in particular, the invention provides amino acid sequences (such as the p19+ sequences, p19− sequences, p40+ sequences, p40− sequences, p35 sequences, IL-27 sequences, IL-12Rb1 sequences, IL-12Rb2 sequences and IL-23 sequences described herein) that can bind to heterodimeric cytokines and/or their receptors with an affinity (suitably measured and/or expressed as a K_{D}-value (actual or apparent), a K_{A}-value (actual or apparent), a kₒₙ-rate and/or a k_{off}-rate, or alternatively as an IC₅₀ value, as further described herein) that is as defined herein; as well as compounds and constructs, and in particular proteins and polypeptides, that comprise at least one such amino acid sequence.

[0205] In particular, the amino acid sequences and polypeptides of the invention are preferably such that they:
[0206] bind to heterodimeric cytokines and/or their receptors with a dissociation constant (K_{D}) of 10⁻⁵ to 10⁻¹² moles/liter or less, and preferably 10⁻⁷ to 10⁻¹² moles/liter or less and more preferably 10⁻⁸ to 10⁻¹² moles/liter (i.e. with an association constant (K_{A}) of 10⁵ to 10¹² liter/moles or more, and preferably 10⁷ to 10¹² liter/moles or more and more preferably 10⁸ to 10¹² liter/moles);
[0207] and/or such that they:
[0208] bind to heterodimeric cytokines and/or their receptors with a kₒₙ-rate of between 10² M⁻¹s⁻¹ to about 10⁷ M⁻¹s⁻¹, preferably between 10³ M⁻¹s⁻¹ and 10⁷ M⁻¹s⁻¹, more preferably between 10⁴ M⁻¹s⁻¹ and 10⁷ M⁻¹s⁻¹, such as between 10⁵ M⁻¹s⁻¹ and 10⁷ M⁻¹s⁻¹, and/or such that they:
[0209] bind to heterodimeric cytokines and/or their receptors with a k_{off} rate between 1s⁻¹ (t_{1/2}=0.69 s) and 10⁻⁶ s⁻¹ (providing a near irreversible complex with a t_{1/2} of m days), preferably between 10⁻² s⁻¹ and 10⁻⁶ s⁻¹, more preferably between 10⁻³ s⁻¹ and 10⁻⁶ s⁻¹, such as between 10⁻⁴ s⁻¹ and 10⁻⁶ s⁻¹.

[0210] Preferably, a monovalent amino acid sequence of the invention (or a polypeptide that essentially contains only one amino acid sequence of the invention) is preferably such that it will bind to heterodimeric cytokines and/or their receptors with an affinity less than 500 nM, preferably less than 200 nM, more preferably less than 10 nM, such as less than 500 pM.

[0211] Some preferred IC50 values for binding of the amino acid sequences or polypeptides of the invention to heterodimeric cytokines and/or their receptors will become clear from the further description and examples herein.

[0212] For binding to heterodimeric cytokines and/or their receptors, an amino acid sequence of the invention will usually contain within its amino acid sequence one or more amino acid residues or one or more stretches of amino acid residues (i.e. with each “stretch” comprising two or amino acid residues that are adjacent to each other or in close proximity to each other, i.e. in the primary or tertiary structure of the amino acid sequence) via which the amino acid sequence of the invention can bind to heterodimeric cytokines and/or their receptors, which amino acid residues or stretches of amino acid residues thus form the “site” for binding to heterodimeric cytokines and/or their receptors (also referred to herein as the “antigen binding site”).

[0213] The amino acid sequences provided by the invention are preferably in essentially isolated form (as defined herein), or form part of a protein or polypeptide of the invention (as defined herein), which may comprise or essentially consist of one or more amino acid sequences of the invention and which may optionally further comprise one or more further amino acid sequences (all optionally linked via one or more suitable linkers). For example, and without limitation, the one or more amino acid sequences of the invention may be used as a binding unit in such a protein or polypeptide, which may optionally contain one or more further amino acid sequences that can serve as a binding unit (i.e. against one or more other targets than heterodimeric cytokines and/or their receptors), so as to provide a monovalent, multivalent or multispecific polypeptide of the invention, respectively, all as described herein. Such a protein or polypeptide may also be in essentially isolated form (as defined herein).

[0214] The amino acid sequences (such as the p19+ sequences, p19− sequences, p40+ sequences, p40− sequences, p35 sequences, IL-27 sequences, IL-12Rb1 sequences, IL-12Rb2 sequences and IL-23 sequences described herein) and polypeptides (such as the—for example multivalent, multispecific and/or biparatopic—constructs described herein that comprise at least one p19+ sequence, p19− sequence, p40+ sequence, p40− sequence, p35 sequence, IL-27 sequence, IL-12Rb1 sequence, IL-12Rb2 sequence and/or IL-23 sequence) of the invention as such preferably essentially consist of a single amino acid chain that is not linked via disulphide bridges to any other amino acid sequence or chain (but that may or may not contain one or more intramolecular disulphide bridges. For example, it is known that Nanobodies—as described herein—may sometimes contain a disulphide bridge between CDR3 and CDR1 or FR2). However, it should be noted that one or more amino acid sequences of the invention may be linked to each other and/or to other amino acid sequences (e.g. via disulphide bridges) to provide peptide constructs that may also be useful in the invention (for example Fab′ fragments, F(ab′)₂ fragments, ScFv constructs, “diabodies” and other multispecific constructs. Reference is for example made to the review by Holliger and Hudson, Nat Biotechnol. 2005 September; 23(9):1126-36).

[0215] Generally, when an amino acid sequence of the invention (or a compound, construct or polypeptide comprising the same) is intended for administration to a subject (for example for therapeutic and/or diagnostic purposes as described herein), it is preferably either an amino acid sequence that does not occur naturally in said subject; or, when it does occur naturally in said subject, in essentially isolated form (as defined herein).

[0216] It will also be clear to the skilled person that for pharmaceutical use, the amino acid sequences of the invention (as well as compounds, constructs and polypeptides comprising the same) are preferably directed against human heterodimeric cytokines and/or their receptors; whereas for veterinary purposes, the amino acid sequences and polypeptides of the invention are preferably directed against heterodimeric cytokines and/or their receptors from the species to be treated, or at at least cross-reactive with heterodimeric cytokines and/or their receptors from the species to be treated.

[0217] Furthermore, an amino acid sequence of the invention may optionally, and in addition to the at least one binding site for binding against heterodimeric cytokines and/or their receptors, contain one or more further binding sites for binding against other antigens, proteins or targets.

[0218] The efficacy of the amino acid sequences and polypeptides of the invention, and of compositions comprising the same, can be tested using any suitable in vitro assay, cell-based assay, in vivo assay and/or animal model known per se, or any combination thereof, depending on the specific disease or disorder involved. Suitable assays and animal models will be clear to the skilled person, and for example include in vitro assays such as Biacore (see for example Example 12, 20 or 23), Alpha-screen (see for example Example 14, Example 20 or Example22), FLIPR, ELISA (see for example Example 10) and competitive ELISA (see for example Example 11), cell-based assays such as proliferation of activated PBMCs (for measuring modulation of IL-12 mediated signalling,) IL17 production of activated spleen cells (for measuring modulation of IL-23 mediated signalling, see for example Aggarwal, Journal of Biological Chemistry, 278, 3, 2003, 1910-1914); and assays for measuring differentiation of THE1 and/or inhibition of THE17 cells (for for measuring modulation of IL-23 mediated signalling), and various animal models for inflammatory diseases and disorders, such as models for autoimmune inflammation such as EAE (Experimental Allergic Encephalomyelitis), CIA (Collagen-induced arthritis), IL12-induced neopterin release, and mouse spleen IL17 production; IBD models in mice and rats such as Dextran Sulphate Salt induced Ulcerative Colitis and Dinitrofluorobenzene induced Crohn's disease, as well as the assays and animal models used in the experimental part below and in the prior art cited herein. Based on the disclosure herein, and depending on the heterodimeric cytokine(s) and/or receptor(s) involved, the skilled person will generally be able to select a suitable in vitro assay, cellular assay or animal model to test the amino acid sequences and polypeptides of the invention to a heterodimeric cytokine or a receptor thereof, for their capacity to modulate heterodimeric cytokines and their receptors, and/or the signaling, pathways, biological mechanisms and effects in which these are involved; and for their therapeutic and/or prophylactic effect in respect of one or more diseases and disorders that are associate with a heterodimeric cytokine and/or a receptors thereof.

[0219] Also, according to the invention, amino acid sequences and polypeptides that are directed against heterodimeric cytokines and/or their receptors from a first species of warm-blooded animal may or may not show cross-reactivity with heterodimeric cytokines and/or their receptors from one or more other species of warm-blooded animal. For example, amino acid sequences and polypeptides directed against human heterodimeric cytokines and/or their receptors may or may not show cross reactivity with heterodimeric cytokines and/or their receptors from one or more other species of primates (such as, without limitation, monkeys from the genus Macaca (such as, and in particular, cynomologus monkeys (Macaca fascicularis) and/or rhesus monkeys (Macaca mulatta)) and baboon (Papio ursinus)) and/or with heterodimeric cytokines and/or their receptors from one or more species of animals that are often used in animal models for diseases (for example mouse, rat, rabbit, pig or dog), and in particular in animal models for diseases and disorders associated with heterodimeric cytokines and/or their receptors (such as the species and animal models mentioned herein). In this respect, it will be clear to the skilled person that such cross-reactivity, when present, may have advantages from a drug development point of view, since it allows the amino acid sequences and polypeptides against human heterodimeric cytokines and/or their receptors to be tested in such disease models.

[0220] More generally, amino acid sequences and polypeptides of the invention that are cross-reactive with heterodimeric cytokines and/or their receptors from multiple species of mammal will usually be advantageous for use in veterinary applications, since it will allow the same amino acid sequence or polypeptide to be used across multiple species. Thus, it is also encompassed within the scope of the invention that amino acid sequences and polypeptides directed against heterodimeric cytokines and/or their receptors from one species of animal (such as amino acid sequences and polypeptides against human heterodimeric cytokines and/or their receptors) can be used in the treatment of another species of animal, as long as the use of the amino acid sequences and/or polypeptides provide the desired effects in the species to be treated.

[0221] The present invention is in its broadest sense also not particularly limited to or defined by a specific antigenic determinant, epitope, part, domain, subunit or confirmation (where applicable) of heterodimeric cytokines and/or their receptors against which the amino acid sequences and polypeptides of the invention are directed. In one particular aspect of the invention, the amino acid sequences and polypeptides are (at least) directed against an interaction site (as defined herein) on the heterodimeric cytokine or the receptor.

[0222] As further described herein, a polypeptide of the invention may contain two or more amino acid sequences of the invention that are directed against their intended (cognate) cognate target (such as a heterodimeric cytokine, a receptor for the same, or a subunit of either). Generally, such polypeptides will bind to said said target with increased avidity compared to a single amino acid sequence of the invention. Such a polypeptide may for example comprise two amino acid sequences of the invention that are directed against the same antigenic determinant, epitope, part, domain, subunit or confirmation (where applicable) of said target (which may or may not be an interaction site); or comprise at least one “first” amino acid sequence of the invention that is directed against a first same antigenic determinant, epitope, part, domain, subunit or confirmation (where applicable) of said target (which may or may not be an interaction site); and at least one “second” amino acid sequence of the invention that is directed against a second antigenic determinant, epitope, part, domain, subunit or confirmation (where applicable) different from the first (and which again may or may not be an interaction site). Preferably, in such “biparatopic” polypeptides of the invention, at least one amino acid sequence of the invention is directed against an interaction site (as defined herein), although the invention in its broadest sense is not limited thereto.

[0223] Also, when the target is part of a binding pair (for example, a receptor-ligand binding pair), the amino acid sequences and polypeptides may be such that they compete with the cognate binding partner (e.g. the ligand, receptor or other binding partner, as applicable) for binding to the target, and/or such that they (fully or partially) neutralize binding of the binding partner to the target.

[0224] It is also within the scope of the invention that, where applicable, an amino acid sequence of the invention can bind to two or more antigenic determinants, epitopes, parts, domains, subunits or confirmations of heterodimeric cytokines and/or their receptors. In such a case, the antigenic determinants, epitopes, parts, domains or subunits of heterodimeric cytokines and/or their receptors to which the amino acid sequences and/or polypeptides of the invention bind may be essentially the same (for example, if heterodimeric cytokines and/or their receptors contains repeated structural motifs or occurs in a multimeric form) or may be different (and in the latter case, the amino acid sequences and polypeptides of the invention may bind to such different antigenic determinants, epitopes, parts, domains, subunits of heterodimeric cytokines and/or their receptors with an affinity and/or specificity which may be the same or different). Also, for example, when heterodimeric cytokines and/or their receptors exists in an activated conformation and in an inactive conformation, the amino acid sequences and polypeptides of the invention may bind to either one of these confirmation, or may bind to both these confirmations (i.e. with an affinity and/or specificity which may be the same or different). Also, for example, the amino acid sequences and polypeptides of the invention may bind to a conformation of heterodimeric cytokines and/or their receptors in which it is bound to a pertinent ligand, may bind to a conformation of heterodimeric cytokines and/or their receptors in which it not bound to a pertinent ligand, or may bind to both such conformations (again with an affinity and/or specificity which may be the same or different).

[0225] It is also expected that the amino acid sequences and polypeptides of the invention will generally bind to all naturally occurring or synthetic analogs, variants, mutants, alleles, parts and fragments of heterodimeric cytokines and/or their receptors; or at least to those analogs, variants, mutants, alleles, parts and fragments of heterodimeric cytokines and/or their receptors that contain one or more antigenic determinants or epitopes that are essentially the same as the antigenic determinant(s) or epitope(s) to which the amino acid sequences and polypeptides of the invention bind in heterodimeric cytokines and/or their receptors (e.g. in wild-type heterodimeric cytokines and/or their receptors). Again, in such a case, the amino acid sequences and polypeptides of the invention may bind to such analogs, variants, mutants, alleles, parts and fragments with an affinity and/or specificity that are the same as, or that are different from (i.e. higher than or lower than), the affinity and specificity with which the amino acid sequences of the invention bind to (wild-type) heterodimeric cytokines and/or their receptors. It is also included within the scope of the invention that the amino acid sequences and polypeptides of the invention bind to some analogs, variants, mutants, alleles, parts and fragments of heterodimeric cytokines and/or their receptors, but not to others.

[0226] The amino acid sequences, polypeptides and compositions of the present invention can generally be used to modulate (as defined herein) the signalling that is mediated by heterodimeric cytokines and/or their receptors, to modulate (as defined herein) the biological pathways in which heterodimeric cytokines and/or their receptors are involved, and/or to modulate (as defined herein) the biological mechanisms, responses and effects associated with heterodimeric cytokines, their receptors, such signalling and/or these pathways (all the foregoing is also collectively referred to herein as “heterodimeric cytokine-mediated signalling”).

[0227] As such, the amino acid sequences, polypeptides and compositions of the present invention can generally be used to modulate the immune system and/or one or more specific immune responses in a subject to which one or more of the amino acid sequences, polypeptides and compositions of the present invention are administered (i.e. in therapeutically relevant amounts).

[0228] The term “heterodimeric cytokines” as used herein in its broadest sense generally includes any heterodimeric cytokine, i.e. a cytokine that comprises at least two, and more preferably only two, subunits.

[0229] In particular, the term “heterodimeric cytokine” as used herein encompasses heterodimeric cytokines that are associated with cell-mediated (T_{H}1) immunity, although the invention is its broadest sense is not limited thereto and also encompasses heterodimeric cytokines associated with humoral (T_{H}2) immunity.

[0230] According to one specific, but non-limiting aspect, the amino acid sequences and polypeptides of invention are directed against a heterodimeric cytokine that is chosen from heterodimeric cytokines that comprise a p40 subunit or p40-like subunit, such as a p40 subunit (present in for example IL-12 and IL-23) or Epstein-Barr virus (EBV)-induced molecule 3 (EBI3, present in for example IL-27 and IL-35).

[0231] According to another specific, but non-limiting aspect, the amino acid sequences and polypeptides of invention are directed against a heterodimeric cytokine that is chosen from heterodimeric cytokines that comprise a p19 subunit or a p19-like subunit, such as a p19 subunit (present in for example IL-23), a p35 subunit (present in for example IL-12 and IL-35), or a p28 subunit (present in for example IL-27) or a homolog thereof.

[0232] For example, the amino acid sequences and polypeptides of invention may be directed against a heterodimeric cytokine that will comprise at least one p19 subunit or p19-like subunit and at least one p40 subunit or p40-like subunit.

[0233] According to an even more specific, but non-limiting aspect, the amino acid sequences and polypeptides of invention are directed against a heterodimeric cytokine that is chosen from IL-12, IL-23, IL-27 and/or IL-35.

[0234] In one specific aspect, but non-limiting aspect, the amino acid sequences and polypeptides of the invention are directed against IL-23 (i.e. against p40, p19 or both). Such amino acid sequences and polypeptides of the invention (as well as compositions comprising the same) may be as further described herein and can be used for preventing and treating disorders associated with IL-23, the IL-23 receptor and/or IL-23 mediated signalling. Reference is again made to the prior art cited above. Also, as mentioned herein, the amino acid sequences and polypeptides of the invention that are directed against IL-23, and in particular those that are specific for (as defined herein) IL-23 compared to IL-12, may have advantages for therapeutic use over the amino acid sequences and polypeptides of the invention that are directed against IL-12. Also, as mentioned herein, the amino acid sequences and polypeptides of the invention that are directed against p19, and in particular those that are specific for (as defined herein) p19 compared to p35 and p40, may have advantages for therapeutic use over the amino acid sequences and polypeptides of the invention that are directed against p35 or p40.

[0235] According to another specific, but non-limiting aspect, the invention provides amino acid sequences and polypeptides that are directed against at least one subunit of a heterodimeric cytokine (as defined herein). These amino acid sequences and/or polypeptides may be as further described herein.

[0236] In another specific, but non-limiting aspect, the invention provides “bispecific” (as defined herein) polypeptides that are directed against both subunits of a heterodimeric cytokine. These polypeptides may be as further described herein.

[0237] In another specific, but non-limiting aspect, the invention provides “biparatopic” (as defined herein) polypeptides that are directed against one subunit of a heterodimeric cytokine. These polypeptides may be as further described herein.

[0238] In particular, but without limitation, the invention provides amino acid sequences and polypeptides that are directed against at least one subunit of a heterodimeric cytokine, wherein said heterodimeric cytokine is associated with cell-mediated (T_{H}1) immunity.

[0239] For example, in one specific, but non-limiting aspect, the invention provides amino acid sequences and polypeptides that are directed against at least one subunit of a heterodimeric cytokine, wherein said heterodimeric cytokine is chosen from heterodimeric cytokines that comprise a p40 subunit or p40-like subunit, such as a p40 subunit (present in for example IL-12 and IL-23) or Epstein-Barr virus (EBV)-induced molecule 3 (EBI3, present in for example IL-27 and IL-35).

[0240] In another specific, but non-limiting aspect, the invention provides amino acid sequences and polypeptides that are directed against a p40 subunit or a p40-like subunit, such as against one of the following subunits: p40 and/or EBI3, or a mutant, variant, allele or homolog of each of the foregoing.

[0241] In another specific, but non-limiting aspect, the invention provides amino acid sequences and polypeptides that are directed against at least one subunit of a heterodimeric cytokine, wherein said heterodimeric cytokine is chosen from heterodimeric cytokines that comprise a p19 subunit or p19-like subunit, such as a p19 subunit (present in for example IL-23), a p35 subunit (present in for example IL-12 and IL-35), a p28 subunit (present in for example IL-27), or a mutant, variant, allele or homolog of each of the foregoing. These amino acid sequences and/or polypeptides may be as further described herein.

[0242] In another specific, but non-limiting aspect, the invention provides amino acid sequences and polypeptides that are directed against a p19 subunit or p19-like subunit, such as against one of the following subunits: p19, p35 and/or p28, or a mutant, variant, allele or homolog of each of the foregoing. These amino acid sequences and/or polypeptides may be as further described herein.

[0243] In another specific, but non-limiting aspect, the invention provides amino acid sequences and polypeptides that are directed against at least one subunit of one of the following heterodimeric cytokines: IL-12, IL-23, IL-27 and/or IL-35. These amino acid sequences and/or polypeptides may be as further described herein.

[0244] In another specific, but non-limiting aspect, the invention provides amino acid sequences and polypeptides that are directed against IL-12 or at least one subunit of IL-12, which amino acid sequences and/or polypeptides may be as further described herein.

[0245] In another specific, but non-limiting aspect, the invention provides amino acid sequences and polypeptides that are directed against IL-23 or at least one subunit of IL-23, which amino acid sequences and/or polypeptides may be as further described herein.

[0246] In another specific, but non-limiting aspect, the invention provides amino acid sequences and polypeptides that are directed against IL-27 or at least one subunit of IL-27, which amino acid sequences and/or polypeptides may be as further described herein.

[0247] In another specific, but non-limiting aspect, the invention provides amino acid sequences and polypeptides that are directed against IL-35 or at least one subunit of IL-35, which amino acid sequences and/or polypeptides may be as further described herein.

[0248] For example, such a polypeptide against IL-12, IL-23, IL-27 or IL-35 may comprise or essentially consist of a single amino acid sequence of the invention (such as a Nanobody) that is directed against IL-12, IL-23, IL-27 or IL-35, respectively, and in particular against an interaction site (as defined herein) on IL-12, IL-23, IL-27 or IL-35. When such a polypeptide comprises two or more amino acid sequences of the invention (optionally linked to each other via one or more suitable linkers, as described herein) that are directed against IL-12, IL-23, IL-27 or IL-35 respectively, these amino acid sequences may be directed against the same epitope, antigenic determinant, part, domain or stretch of amino acid residues on IL-12, IL-23, IL-27 or IL-35, respectively, or against different epitopes, antigenic determinants, parts, domains or stretches of amino acid residues on IL-12, IL-23, IL-27 or IL-35. For example, such a polypeptide may comprise one or more amino acid sequences of the invention that are directed against an interaction site (as defined herein, and in particular the receptor binding site) on IL-12, IL-23, IL-27 or IL-35, respectively, and one or more amino acid sequences of the invention that are directed against a site, epitope, antigenic determinant, part, domain or stretch of amino acid residues on IL-12, IL-23, IL-27 or IL-35, respectively, that is not an interaction site. Such a polypeptide may also comprise one or more amino acid sequences of the invention that are directed against an interaction site (as defined herein, and in particular the receptor binding site) on IL-12, IL-23, IL-27 or IL-35, respectively, and one or more amino acid sequences that are directed against a different interaction site (as defined herein) on IL-12, IL-23, IL-27 or IL-35, respectively. It is also possible that such a polypeptide comprises two or more amino acid sequences of the invention that are directed against the same interaction site (as defined herein, and in particular the receptor binding site) on IL-12, IL-23, IL-27 or IL-35, respectively.

[0249] For example, such a polypeptide may comprise one or more amino acid sequences of the invention (such as one or more Nanobodies) that can modulate binding of IL-12, IL-23, IL-27 or IL-35, respectively, to its receptor; and/or one or more amino acid sequences of the invention (such as one or more Nanobodies) that do not modulate (and in particular inhibit) binding of IL-12, IL-23, IL-27 or IL-35, respectively, to its receptor. For example, such a polypeptide may comprise one amino acid sequence of the invention (such as a Nanobodies) that can modulate binding of IL-12, IL-23, IL-27 or IL-35, respectively, to its receptor and one amino acid sequence of the invention (such as a Nanobody) that does not modulate binding of IL-12, IL-23, IL-27 or IL-35, respectively, to its receptor.

[0250] Examples of such polypeptides of the invention will become clear from the further description herein.

[0251] In another specific, but non-limiting aspect, the invention provides amino acid sequences and polypeptides that are directed against p19 (also referred to herein as “p19 sequences”). Such amino acid sequences and/or polypeptides may be as further described herein (for example, such amino acid sequences may be may be “p19+ sequences” or “p19− sequences”). For example, such a polypeptide may be a polypeptide that contains one or more amino acid sequences against p19, such as one or more Nanobodies against p19. It is expected that such a polypeptide of the invention will be selective for IL-23 and other heterodimeric cytokines that contain p19 compared to IL-12, IL-27 and/or IL-35.

[0252] In another specific, but non-limiting aspect, the invention provides amino acid sequences and polypeptides that are directed against p35. Such amino acid sequences and/or polypeptides may be as further described herein. For example, such a polypeptide may be a polypeptide that contains one or more amino acid sequences against p35, such as one or more Nanobodies against p3 5. It is expected that such a polypeptide of the invention will be selective for IL-12 and/or IL-35 and other heterodimeric cytokines that contain p40 compared to IL-12 and/or IL-27.

[0253] In another specific, but non-limiting aspect, the invention provides amino acid sequences and polypeptides that are directed against p28. Such amino acid sequences and/or polypeptides may be as further described herein. For example, such a polypeptide may be a polypeptide that contains one or more amino acid sequences against p28, such as one or more Nanobodies against p28. It is expected that such a polypeptide of the invention will be selective for IL-27 and other heterodimeric cytokines that contain p28 compared to IL-12, IL-23 and/or IL-35.

[0254] In another specific, but non-limiting aspect, the invention provides amino acid sequences and polypeptides that are directed against p40. Such amino acid sequences and/or polypeptides may be as further described herein (for example, such amino acid sequences may be may be “p40+ sequences” or “p40+sequences”). For example, such a polypeptide may be a polypeptide that contains one or more amino acid sequences against p40, such as one or more Nanobodies against p40. It is expected that such a polypeptide of the invention will be selective for IL-12 and/or IL-23 and other heterodimeric cytokines that contain p40 compared to IL-27 and/or IL-35.

[0255] In another specific, but non-limiting aspect, the invention provides amino acid sequences and polypeptides that are directed against EBI3. Such amino acid sequences and/or polypeptides may be as further described herein. For example, such a polypeptide may be a polypeptide that contains one or more amino acid sequences against EBI3, such as one or more Nanobodies against EBI3. It is expected that such a polypeptide of the invention will be selective for IL-27 and/or IL-23 and other heterodimeric cytokines that contain EBI3 compared to IL-12 and/or IL-23.

[0256] For example, such a polypeptide against p19, p35, p28, p40 or EBI3, respectively, may comprise or essentially consist of a single amino acid sequence of the invention (such as a Nanobody) that is directed against p19, p35, p28, p40 or EBI3, respectively, and in particular against an interaction site (as defined herein) on p19, p35, p28, p40 or EBI3. When such a polypeptide comprises two or more amino acid sequences of the invention (optionally linked to each other via one or more suitable linkers, as described herein) that are directed against p19, p35, p28, p40 or EBI3, respectively, these amino acid sequences may be directed against the same epitope, antigenic determinant, part, domain or stretch of amino acid residues on p19, p35, p28, p40 or EBI3, respectively, or against different epitopes, antigenic determinants, parts, domains or stretches of amino acid residues on p19, p35, p28, p40 or EBI3. For example, such a polypeptide may comprise one or more amino acid sequences of the invention that are directed against an interaction site (as defined herein, and in particular a site that is involved in binding of the heterodimeric cytokine in which said subunit is present to its receptor) on p19, p35, p28, p40 or EBI3, respectively, and one or more amino acid sequences of the invention that are directed against a site, epitope, antigenic determinant, part, domain or stretch of amino acid residues on p19, p35, p28, p40 or EBI3, respectively, that is not an interaction site. Such a polypeptide may also comprise one or more amino acid sequences of the invention that are directed against an interaction site (as defined herein, and in particular the receptor binding site) on p19, p35, p28, p40 or EBI3, respectively, and one or more amino acid sequences that are directed against a different interaction site (as defined herein) on p19, p35, p28, p40 or EBI3, respectively. It is also possible that such a polypeptide comprises two or more amino acid sequences of the invention that are directed against the same interaction site (as defined herein, and in particular a site that is involved in binding of the heterodimeric cytokine in which said subunit is present to its receptor) on p19, p35, p28, p40 or EBI3, respectively.

[0257] For example, such a polypeptide may comprise one or more amino acid sequences of the invention (such as one or more Nanobodies) that are directed against p19, p35, p28, p40 or EBI3, respectively, and that can modulate (and in particular inhibit) binding of the heterodimeric cytokine in which said subunit is present to its receptor; and/or one or more amino acid sequences of the invention (such as one or more Nanobodies) that are directed against p19, p35, p28, p40 or EBI3, respectively, but that are not capable of modulate binding of the heterodimeric cytokine in which said subunit is present to its receptor.

[0258] Again, examples of such polypeptides of the invention will become clear from the further description herein.

[0259] In another specific, but non-limiting aspect, the invention provides amino acid sequences and (in particular) polypeptides that are directed against two different subunits that occur in heterodimeric cytokines. In particular, the invention provides amino acid sequences and (in particular) polypeptides that are directed against two different subunits that occur in heterodimeric cytokines (and in particular in heterodimeric cytokines from the IL-12 family, such as in IL-12, IL-23, IL-27 and IL-35). For example, such an amino acid sequence or polypeptide may be directed (a) against p19 or a p19-like subunit, such as against p19, p35 or p28; and against at least one other subunit that occurs in a heterodimeric cytokine (such as in IL-12, IL-23, IL-27 and IL-35); or (b) against p40 or a p40-like subunit, such as against p40 or EBI-3 and against at least one other subunit that occurs in a heterodimeric cytokine (such as in IL-12, IL-23, IL-27 and IL-35).

[0260] More in particular, the invention provides amino acid sequences and (in particular) polypeptides that are directed against (i) at least one p19 or p19-like subunit, such as against p19, p35 or p28; and (ii) at least one p40 or p40-like subunit, such as against p40 or EBI-3.

[0261] Such an amino acid sequence or polypeptide of the invention may for example also be an amino acid sequence or polypeptide of the invention that is directed towards the interface of two subunits that occur in a heterodimeric cytokine, such as towards the p19/p40 interface in IL-23, against the p35/p40 interface in IL-12, against the p28/EBI3 interface in IL-27, or against the p35/EBI3 interface in IL-35.

[0262] In a specifically preferred aspect, such a polypeptide of the invention may be a “bispecific” and in particular “biparatopic” polypeptide of the invention (as further described herein) that comprises at least one amino acid sequence of the invention (such as a Nanobody) that is directed against at least one p19 or p19-like subunit (such as against p19, p35 or p28), and at least one amino acid sequence of the invention (such as a Nanobody) that is directed against at least one p40 or p40-like subunit (such as against p40 or EBI-3).

[0263] For example, the invention provides:
[0264] amino acid sequences and (in particular) polypeptides that are directed against p19 and p40, which are expected to be selective for IL-23 compared to IL-12, IL-27 and IL-35. For example, such a biparatopic polypeptide may comprise at least one amino acid sequence of the invention that is directed against p19 and at least one amino acid sequence of the invention that is directed against p40;
[0265] amino acid sequences and (in particular) polypeptides that are directed against p35 and p40, which are expected to be selective for IL-12 compared to IL-23, IL-27 and IL-35. For example, such a biparatopic polypeptide may comprise at least one amino acid sequence of the invention that is directed against p35 and at least one amino acid sequence of the invention that is directed against p40;
[0266] amino acid sequences and (in particular) polypeptides that are directed against p35 and EBI3, which are expected to be selective for IL-35 compared to IL-12, IL-23 and IL-27. For example, such a biparatopic polypeptide may comprise at least one amino acid sequence of the invention that is directed against p35 and at least one amino acid sequence of the invention that is directed against EBI3;
[0267] amino acid sequences and (in particular) polypeptides that are directed against p28 and EBI3, which are expected to be selective for IL-27 compared to IL-12, IL-23 and IL-35. For example, such a biparatopic polypeptide may comprise at least one amino acid sequence of the invention that is directed against p28 and at least one amino acid sequence of the invention that is directed against EBI3.

[0268] Again, all such amino acid sequences and/or polypeptides may be as further described herein, and some examples of such polypeptides of the invention will become clear from the further description herein.

[0269] For example, such a polypeptide may comprise:
[0270] one or more amino acid sequences of the invention that are directed against an interaction site (as defined herein, and in particular a site that is involved in binding of the heterodimeric cytokine in which said subunit is present to its receptor) on the p19 or p19-like subunit; and one or more amino acid sequences of the invention that are directed against a site, epitope, antigenic determinant, part, domain or stretch of amino acid residues on the p40 or p40-like subunit that is not an interaction site;
[0271] one or more amino acid sequences of the invention that are directed against an interaction site (as defined herein, and in particular a site that is involved in binding of the heterodimeric cytokine in which said subunit is present to its receptor) on the p40 or p40-like subunit; and one or more amino acid sequences of the invention that are directed against a site, epitope, antigenic determinant, part, domain or stretch of amino acid residues on the p19 or p19-like subunit that is not an interaction site; or
[0272] one or more amino acid sequences of the invention that are directed against an interaction site (as defined herein) on the p40 or p40-like subunit; and one or more amino acid sequences of the invention that are directed against an interaction site on the p19 or p19-like subunit;
[0273] one or more amino acid sequences of the invention that are directed against the p19 or p19-like subunit and that can modulate (and in particular inhibit) binding of the heterodimeric cytokine in which said p19 or p19-like subunit is present to its receptor; and/or one or more amino acid sequences of the invention that are directed against the p40 or p40-like subunit but that are not capable of modulating binding of the heterodimeric cytokine in which said p40 or p40-like subunit is present to its receptor;
[0274] one or more amino acid sequences of the invention that are directed against the p40 or p40-like subunit and that can modulate (and in particular inhibit) binding of the heterodimeric cytokine in which said p40 or p40-like subunit is present to its receptor; and/or one or more amino acid sequences of the invention that are directed against the p19 or p19-like subunit but that are not capable of modulating binding of the heterodimeric cytokine in which said p19 or p19-like subunit is present to its receptor;
[0275] one or more amino acid sequences of the invention that are directed against the p19 or p19-like subunit and that can modulate (and in particular inhibit) binding of the heterodimeric cytokine in which said p19 or p19-like subunit is present to its receptor; and one or more amino acid sequences of the invention that are directed against the p40 or p40-like subunit and that can modulate (and in particular inhibit) binding of the heterodimeric cytokine in which said p40 or p40-like subunit is present to its receptor.

[0276] Again, all such amino acid sequences and/or polypeptides may be as further described herein, and some examples of such polypeptides of the invention will become clear from the further description herein.

[0277] Accordingly, in a specific, but non-limiting aspect, the invention provides amino acid sequences and polypeptides that are directed against two or more subunits of heterodimeric cytokines. For example, the invention comprises multispecific proteins and polypeptides (as described herein) that comprise at least one binding unit against a first subunit of a heterodimeric cytokine and at least one binding unit against a second subunit of a heterodimeric cytokine that is different from said first subunit. For example, the invention comprises such multispecific proteins and polypeptides which comprise at least one binding unit against a first subunit of a heterodimeric cytokine and at least one binding unit against a second subunit of a heterodimeric cytokine that is different from said first subunit, in which said first and second subunit form part of the same heterodimeric cytokine (in other words, such multi specific proteins or polypeptides are “biparatopic” with respect to said heterodimeric cytokine, in that they are capable of binding to two different epitopes on said heterodimeric cytokine. Alternatively, and without limitation, a protein or polypeptide as described herein may for example be biparatopic in respect of one of the subunits mentioned herein, i.e. comprise at least one binding unit against a first epitope on said subunit and at least one binding unit against a second epitope on said subunit). Some non-limiting examples of such multispecific proteins and polypeptides are multispecific proteins and polypeptides that are directed against p35 and p40 (which are both present in IL-12, so that such a multivalent protein or polypeptide is expected to be specific for IL-12), against p 19 and p40 (both present in IL-23), or against p28 and EBI3 (both present in IL-27).

[0278] More generally, the invention comprises such multispecific proteins and polypeptides which comprise at least one binding unit against a first subunit of a heterodimeric cytokine and at least one binding unit against a second subunit of a heterodimeric cytokine that is different from said first subunit, in which said first and second subunit are chosen from p19, p35, p28, p40 and/or EBI3; and/or mutants, variants, alleles or homologs of each of the foregoing. For example, such multispecific proteins and polypeptides may comprise at least one binding unit which is directed against a p19-like subunit such as p19, p35 or p 28 and at least one binding unit that is directed against a p40-like subunit such as p40 or EBI3 (it should also be noted that the invention even more generally relates to any multispecific protein and polypeptide which comprises at least one binding unit that is directed against a heterodimeric cytokine or a subunit thereof—such as p19, p35, p28, p40 and/or EBI3—and at least one further binding unit that is directed against any other (e.g. non-heterodimeric cytokine) desired target, antigenic determinant or epitope).

[0279] It will also be clear to the skilled person that an amino acid sequence or polypeptide as described herein may be directed against the interface between the two subunits that form a heterodimeric cytokine (usually the interface between a p19-like subunit and a p40-like subunit). Thus, such an amino acid sequence and polypeptide will often be able to (simultaneously) bind to both subunits that form the heterodimeric cytokine, so as to span the interface between said two subunits. For example, the amino acid sequences and polypeptides described herein may be directed against the p35/p40 interface of IL-12, against the p19/p40 interface of IL-23, or against the p28/EBI-3 interface of IL-28.

[0280] Thus, from the above, it will be clear to the skilled person that the amino acid sequences and polypeptides described herein may be directed against a single heterodimeric cytokine (or against a single subunit of a heterodimeric cytokine), but may also be directed against multiple heterodimeric cytokines (or against multiple subunits thereof, that either form part of the same heterodimeric cytokine or even of different heterodimeric cytokines).

[0281] In one specific, but non-limiting aspect, the amino acid sequences and polypeptides described herein are specific for (as defined herein) IL-23, compared to IL-12, IL-27 and IL-35.

[0282] In another specific, but non-limiting aspect, the amino acid sequences and polypeptides described herein are specific for (as defined herein) IL-12, compared to IL-23, IL-27 and IL-35.

[0283] In another specific, but non-limiting aspect, the amino acid sequences and polypeptides described herein are specific for (as defined herein) IL-27, compared to IL-12, IL-23 and IL-35.

[0284] In another specific, but non-limiting aspect, the amino acid sequences and polypeptides described herein are specific for (as defined herein) IL-35, compared to IL-12, IL-23 and IL-27.

[0285] In another specific, but non-limiting aspect, the amino acid sequences and polypeptides described herein are specific for (as defined herein) the p19 subunit, compared to the p35 or p28 subunits. Such amino acid sequences and polypeptides are expected to be specific for IL-23 (i.e. compared to IL-12, IL-27 and IL-35).

[0286] In another specific, but non-limiting aspect, the amino acid sequences and polypeptides described herein are specific for (as defined herein) the p28 subunit, compared to the p35 or p19 subunits. Such amino acid sequences and polypeptides are expected to be specific for IL-27 (i.e. compared to IL-12, IL-23 and IL-35).

[0287] In another specific, but non-limiting aspect, the amino acid sequences and polypeptides described herein are specific for (as defined herein) the p35 subunit, compared to the p28 or p19 subunits. Such amino acid sequences and polypeptides are expected to be specific for IL-12 and IL-35 (i.e. compared to IL-23 and IL-27).

[0288] In another specific, but non-limiting aspect, the amino acid sequences and polypeptides described herein are specific for (as defined herein) the p40 subunit, compared to EBI-3. Such amino acid sequences and polypeptides are expected to be specific for IL-12 and IL-23 (i.e. compared to IL-27 and IL-35).

[0289] In another specific, but non-limiting aspect, the amino acid sequences and polypeptides described herein are specific for (as defined herein) the EBI-3 subunit, compared to the p40 subunit. Such amino acid sequences and polypeptides are expected to be specific for IL-27 and IL-35 (i.e. compared to IL-12 and IL-23).

[0290] In another specific, but non-limiting aspect, the amino acid sequences and polypeptides described herein are specific for both the p19 and p40 subunits (compared to other subunits), and in particular directed against (as defined herein, i.e. capable of specifically binding to) the p19 and p40 subunits, but not directed against (i.e. not capable of specifically binding to) any of the subunits p35, p28 and/or EBI3 (or, according to an even more specific aspect, not directed to any p19-like subunit other than p19 and not directed to any p40-like subunit other than p40). Such amino acid sequences (which may for example span the p19/p40 interface in IL-23 as described herein) or polypeptides (which may for example be bispecific polypeptides with at least one binding unit directed against p19 and at least one binding unit directed against p40) are expected to be specific for IL-23 compared to IL-27, and are expected to bind with higher avidity (and preferably also selectivity) to IL-23 compared to IL-12.

[0291] In another specific, but non-limiting aspect, the amino acid sequences and polypeptides described herein are specific for both the p35 and p40 subunits (compared to other subunits), and in particular directed against (as defined herein, i.e. capable of specifically binding to) the p35 and p40 subunits, but not directed against (i.e. not capable of specifically binding to) any of the subunits p19, p28 and/or EBI3 (or, according to an even more specific aspect, not directed to any p19-like subunit other than p35 and not directed to any p40-like subunit other than p40). Such amino acid sequences (which may for example span the p35/p40 interface in IL-12 as described herein) or polypeptides (which may for example be bispecific polypeptides with at least one binding unit directed against p35 and at least one binding unit directed against p40) are expected to be specific for IL-12 compared to IL-27, and are expected to bind with higher avidity (and preferably also selectivity) to IL-12 compared to IL-23.

[0292] In another specific, but non-limiting aspect, the amino acid sequences and polypeptides described herein are specific for both the p28 and EBI-3 subunits (compared to other subunits), and in particular directed against (as defined herein, i.e. capable of specifically binding to) the p28 subunit and EBI-3, but not directed against (i.e. not capable of specifically binding to) any of the subunits p19, p35 and/or p40 (or, according to an even more specific aspect, not directed to any p19-like subunit other than p28 and not directed to any p40-like subunit other than EBI-3). Such amino acid sequences (which may for example span the p28/EBI-3 interface in IL-27 as described herein) or polypeptides (which may for example be bispecific polypeptides with at least one binding unit directed against p28 and at least one binding unit directed against EBI3) are expected to be specific for IL-27 compared to IL-12 and IL-23.

[0293] The invention also provides amino acid sequences and polypeptides that are directed against receptors for heterodimeric cytokines, in particular for receptors of the heterodimeric cytokines described herein.

[0294] More in particular, the invention provides amino acid sequences and polypeptides that are directed against receptors for heterodimeric cytokines, wherein said receptors are receptors for heterodimeric cytokines that are associated with cell-mediated (T_{H}1) immunity.

[0295] In one specific, but non-limiting aspect, the invention provides amino acid sequences and polypeptides that are directed against receptors for heterodimeric cytokines, wherein said receptors are receptors for heterodimeric cytokines that contain one or more p19-like subunits, and/or that contain one or more p40-like subunits, and in particular contain one or more of the following subunits: p19, p35, p28, p40 and/or EBI3; or a mutant, variant, allele or homolog of each of the foregoing.

[0296] In another specific, but non-limiting aspect, the invention provides amino acid sequences and polypeptides that are directed against receptors for heterodimeric cytokines, wherein said receptors are receptors for heterodimeric cytokines that at least contain the p19 subunit.

[0297] In another specific, but non-limiting aspect, the invention provides amino acid sequences and polypeptides that are directed against receptors for heterodimeric cytokines, wherein said receptors are receptors for heterodimeric cytokines that at least contain the p35 subunit.

[0298] In another specific, but non-limiting aspect, the invention provides amino acid sequences and polypeptides that are directed against receptors for heterodimeric cytokines, wherein said receptors are receptors for heterodimeric cytokines that at least contain the p28 subunit.

[0299] In another specific, but non-limiting aspect, the invention provides amino acid sequences and polypeptides that are directed against receptors for heterodimeric cytokines, wherein said receptors are receptors for heterodimeric cytokines that at least contain the p40 subunit.

[0300] In another specific, but non-limiting aspect, the invention provides amino acid sequences and polypeptides that are directed against receptors for heterodimeric cytokines, wherein said receptors are receptors for heterodimeric cytokines that at least contain EBI3.

[0301] In another specific, but non-limiting aspect, the invention provides amino acid sequences and polypeptides that are directed against a receptor for IL-12, IL-23, IL-27 and/or IL-35, respectively, and preferably against a high-affinity receptor for IL-12, IL-23, IL-27 and/or IL-35, respectively.

[0302] In another specific, but non-limiting aspect, the invention provides amino acid sequences and polypeptides that are directed against a receptor for IL-12, and preferably against a high-affinity receptor for IL-12, or against at least one subunit thereof. More preferably, such amino acid sequences and polypeptides are specific for (as defined herein) the (cognate) receptor of IL-12 compared the (cognate) receptor of IL-23R and/or the (cognate) receptor of IL-27.

[0303] In another specific, but non-limiting aspect, the invention provides amino acid sequences and polypeptides that are directed against a receptor for IL-23, and preferably against a high-affinity receptor for IL-23, or against at least one subunit thereof. More preferably, such amino acid sequences and polypeptides are specific for (as defined herein) the (cognate) receptor of IL-23 compared to the (cognate) receptor of IL-12 and/or the (cognate) receptor of IL-27.

[0304] In another specific, but non-limiting aspect, the invention provides amino acid sequences and polypeptides that are directed against a receptor for IL-27, and preferably against a high-affinity receptor for IL-27, or against at least one subunit thereof. More preferably, such amino acid sequences and polypeptides are specific for (as defined herein) the (cognate) receptor of IL-27 compared to the (cognate) receptor of IL-12 and the (cognate) receptor of IL-23.

[0305] In another specific, but non-limiting aspect, the invention provides amino acid sequences and polypeptides that are directed against a receptor for IL-35, and preferably against a high-affinity receptor for IL-35, or against at least one subunit thereof.

[0306] The above amino acid sequences and polypeptides may all be as further described herein.

[0307] In another specific, but non-limiting aspect, the invention provides amino acid sequences and polypeptides that are directed against at least one subunit of a receptor for IL-12, IL-23, IL-27 and/or IL-35, and that preferably are directed against a subunit of a high-affinity receptor for IL-12, IL-23, IL-27 and/or IL-35. Such amino acid sequences and polypeptides of the invention may for example be directed against a IL-23-like subunit of such a receptor, against a gp130-like subunit of such a receptor, or both (e.g. in the case of bispecific/biparatopic polypeptides of the invention).

[0308] Preferably, such amino acid sequences and polypeptides are directed against a IL-23-like subunit of such a receptor such as IL-12Rbeta-2, IL-23R and WSX-1 (with amino acid sequences and polypeptides against gp-130 like subunits such as the IL-12Rbeta-1 subunit or against gp130, although not excluded from the scope of the invention, being less preferred).

[0309] In another specific, but non-limiting aspect, the invention provides amino acid sequences and polypeptides that are directed against at least one subunit of a receptor for IL-12, preferably against a high-affinity receptor for IL-12. Preferably, said amino acid sequences and polypeptides are directed against the IL-12Rbeta-2 subunit. More preferably, such amino acid sequences and polypeptides are specific for (as defined herein) the IL-12Rbeta-2 subunit compared to the IL-23R subunit and the WSX-1 subunit. It is expected that such amino acid sequences and polypeptides will be specific for the (cognate) receptor of IL-12 compared to the (cognate) receptor of IL-23 and/or the (cognate) receptor of IL-27.

[0310] In another specific, but non-limiting aspect, the invention provides amino acid sequences and polypeptides that are directed against at least one subunit of a receptor for IL-23, and preferably against a high-affinity receptor for IL-23. Preferably, said amino acid sequences and polypeptides are directed against the IL-23R subunit. More preferably, such amino acid sequences and polypeptides are specific for (as defined herein) the IL-23R subunit compared to the IL-12Rbeta-2 subunit and the WSX-1 subunit. It is expected that such amino acid sequences and polypeptides will be specific for the (cognate) receptor of IL-23 compared to the (cognate) receptor of IL-12 and/or the (cognate) receptor of IL-27.

[0311] In another specific, but non-limiting aspect, the invention provides amino acid sequences and polypeptides that are directed against at least one subunit of a receptor for IL-27, and preferably against a high-affinity receptor for IL-27. Preferably, said amino acid sequences and polypeptides are directed against the WSX-1 subunit. More preferably, such amino acid sequences and polypeptides are specific for (as defined herein) the WSX-1 subunit IL-23R subunit compared to the IL-12Rbeta-2 subunit and the IL-23R subunit. It is expected that such amino acid sequences and polypeptides will be specific for the (cognate) receptor of IL-27 compared to the (cognate) receptor of IL-12 and/or the (cognate) receptor of IL-23.

[0312] The above amino acid sequences and polypeptides may all be as further described herein.

[0313] The invention also provides amino acid sequences and polypeptides that are directed against IL-12Rbeta-1. Preferably, such amino acid sequences and polypeptides are specific for (as defined herein) IL-12Rbeta-1 compared to gp130.

[0314] The invention also provides amino acid sequences and polypeptides that are directed against gp130. Preferably, such amino acid sequences and polypeptides are specific for (as defined herein) gp130 compared to IL-12Rbeta-1.

[0315] These amino acid sequences and polypeptides may all be as further described herein.

[0316] In another specific, but non-limiting aspect, the invention provides bispecific polypeptides that are directed against a first subunit of a receptor for a heterodimeric cytokine, and against a second subunit of a receptor for a heterodimeric cytokine different from said first subunit.

[0317] For example, such a bispecific polypeptide of the invention may comprise at least one amino acid sequence of the invention (such as a Nanobody) that is directed against a gp130-like subunit (such as the gp130 or IL-12beta-1 subunit, or variants, mutants, alleles or homologs thereof), and at least one amino acid sequence of the invention (such as a Nanobody) that is directed against an IL-23 like subunit (such as IL-12Rbeta-2, IL-23, or WSX-1). Preferably, such a bispecific polypeptide is such that it is directed against a gp130-like subunit and an IL-23 like subunit that form part of the same receptor. Such bispecific polypeptides may for example trigger, facilitate and/or enhance activation and/or association of the receptor (or more generally receptor-mediated signalling), for example by mimicking the effects of ligand binding; and thus act as an agonist for the receptor, its ligand and/or the relevant heterodimeric cytokine-mediated signalling (in this respect, it should also be noted that in another aspect, the invention comprises polypeptides of the invention that comprise one or more, such as two, three or four, amino acid sequences of the invention that are directed against a single cytokine receptor chain so as to induce dimerisation or oligomerization and leading to activation of the receptor).

[0318] Alternatively, such bispecific polypeptides may for example block, inhibit or reduce binding of the ligand to the receptor, or block, inhibit or reduce activation and/or association of the receptor after binding of the ligand, and/or more generally act as an agonist for the receptor, its ligand and/or the relevant heterodimeric cytokine-mediated signalling

[0319] For example, the invention provides:
[0320] amino acid sequences and (in particular) polypeptides that are directed against IL12Rbeta1 and IL12Rbeta2, which are expected to be (and preferably are) selective for the IL-12 receptor compared to the IL-23 receptor and the IL-27 receptor. For example, such a biparatopic polypeptide may comprise at least one amino acid sequence of the invention that is directed against IL12Rbeta1 and at least one amino acid sequence of the invention that is directed against IL12Rbeta2;
[0321] amino acid sequences and (in particular) polypeptides that are directed against IL12Rbeta1 and IL23R, which are expected to be (and preferably are) selective for the IL-23 receptor compared to the IL-12 receptor and the IL-27 receptor. For example, such a biparatopic polypeptide may comprise at least one amino acid sequence of the invention that is directed against IL12Rbeta1 and at least one amino acid sequence of the invention that is directed against IL23R;
[0322] amino acid sequences and (in particular) polypeptides that are directed against WSX-1 and gp130, which are expected to be (and preferably are) selective for the IL-27 receptor compared to the IL-12 receptor and the IL-23 receptor. For example, such a biparatopic polypeptide may comprise at least one amino acid sequence of the invention that is directed against WSX-1 and at least one amino acid sequence of the invention that is directed against gp130.

[0323] Again, such amino acid sequences and polypeptides may all be as further described herein.

[0324] In another non-limiting aspect of the invention, a polypeptide of the invention may be a bispecific polypeptide that comprises at least one amino acid sequence of the invention that is directed against a heterodimeric cytokine (or against at least one subunit thereof), and at least one amino acid sequence of the invention that is directed against a receptor for a heterodimeric cytokine (or against at least one subunit thereof). In particular, in this aspect of the invention, a polypeptide of the invention may comprise at least amino acid sequence of the invention that is directed against a heterodimeric cytokine (or at least one subunit thereof), and at least one amino acid sequence of the invention that is directed against a receptor for said heterodimeric cytokine (or at least one subunit thereof), i.e. against the cognate receptor for said heterodimeric cytokine.

[0325] It is expected that such bispecific polypeptides may act as agonists of heterodimeric cytokines, their receptors, and heterodimeric cytokine-mediated signalling, i.e. by promoting or facilitating binding of the heterodimeric cytokine to its receptor, and/or by stabilizing the ligand/receptor complex upon binding of the heterodimeric cytokine to its receptor. For this purpose, such bispecific polypeptides preferably comprise amino acid sequences that do not neutralize binding of the heterodimeric cytokine to the receptor.

[0326] Depending on the amino acid sequences that are chosen to form the construct, it is further expected that such bispecific polypeptides may also be designed to act as an antagonists, i.e. link the cytokine to the receptor without activating it, act as a dominant negative regulator since the receptor is then occupied and inactive).

[0327] Bispecific polypeptides as described herein can also be linked to a Fc portion as described in Applicant's copending application entitled “Immunoglobulin constructs”, which has the same filing date as this application, Dec. 4, 2007.

[0328] Also, a bispecific polypeptide that is directed against a heterodimeric cytokine and against a receptor that is not the cognate receptor for said heterodimeric cytokine, may also be used to modulate the signalling that is mediated by the cytokine against which it is directed and (in particular) by the receptor against which it is directed. For example, a bispecific anti-IL12p35 and anti-IL23R polypeptide of the invention could link IL12 to the IL23 receptor and trigger a IL23 signal.

[0329] For example, the above bispecific polypeptides may comprise:
[0330] at least one amino acid sequence of the invention that is directed against IL-12 (or at least one subunit thereof, and preferably the p35 subunit), and at least one amino acid sequence of the invention that that is directed against the receptor for IL-12 (or at least one subunit thereof, and preferably the IL-12Rbeta-2 subunit).
[0331] at least one amino acid sequence of the invention that that is directed against IL-23 (or at least one subunit thereof, and preferably the p19 subunit), and at least one amino acid sequence of the invention that that is directed against the receptor for IL-23 (or at least one subunit thereof; and preferably the IL-23 subunit); or
[0332] at least one amino acid sequence of the invention that that is directed against IL-27 (or at least one subunit thereof, and preferably the p28 subunit), and at least one amino acid sequence of the invention that that is directed against the receptor for IL-27 (or at least one subunit thereof, and preferably the WSX-1 subunit).

[0333] Again, such amino acid sequences and polypeptides may all be as further described herein.

[0334] When an amino acid sequence or polypeptide of the invention is directed against a heterodimeric cytokine, it may modulate (as defined herein) heterodimeric cytokine-mediated signalling (as defined herein) in several different ways. For example, and although the invention in its broadest sense is not limited to any specific explanation, hypothesis or mechanism, it may be that such an amino acid sequence or polypeptide, upon binding to the heterodimeric cytokine (or to at least one subunit thereof):
[0335] prevents, reduces or inhibits (in part or in full) binding of said heterodimeric cytokine to its receptor (or to at least one subunit thereof);
[0336] prevents, reduces, inhibits the association (i.e. the heterodimerization) of the heterodimeric cytokine (e.g. of its subunits);
[0337] destabilizes the heterodimeric cytokine or otherwise influences the conformation of the heterodimeric cytokine or prevents or reduces the ability of the heterodimeric cytokine to change its confirmation, in particular so as to fully or partially reduce its ability to bind to its receptor (or to at least one subunit thereof) or, upon binding to its receptor, to trigger receptor-mediated signalling;
[0338] still allows the heterodimeric cytokine to bind to its receptor (or to at least one subunit thereof), but upon such binding prevents, reduces, inhibits (in part or in full) the activation and/or dimerization of the receptor (i.e. where the receptor associates upon ligand binding, as is for example the case for the IL-23 receptor, see Parham et al., supra);
[0339] or otherwise prevents, reduces or inhibits the signalling that is caused by binding of the heterodimeric cytokine to its receptor

[0340] Thus, according to one non-limiting aspect, an amino acid sequence or polypeptide of the invention that is directed against a heterodimeric cytokine (and that may further be as described herein) is such that, upon binding to the heterodimeric cytokine, it prevents, reduces or inhibits binding of said heterodimeric cytokine to its receptor or to at least one subunit thereof (i.e. compared to the binding of the heterodimeric cytokine to the same receptor without the presence of the amino acid sequence or polypeptide, and by at least 1%, such as by at least 5%, for example by at least 10%, at least 30%, at least 50%, at least 70% and up to 90% or more, as determined by a suitable assay, such as one of the assays mentioned herein and/or used in the Experimental Part).

[0341] According to another non-limiting aspect, an amino acid sequence or polypeptide of the invention that is directed against a heterodimeric cytokine (and that may further be as described herein) is such that, upon binding to the heterodimeric cytokine and following binding of the heterodimeric cytokine to its receptor (or to at least one subunit of the receptor), it prevents, reduces or inhibits activation and/or association of its receptor (i.e. compared to the association of the receptor mediated by the heterodimeric cytokine without the presence of the amino acid sequence or polypeptide, and by at least 1%, such as by at least 5%, for example by at least 10%, at least 30%, at least 50%, at least 70% and up to 90% or more, as determined by a suitable assay, such as one of the assays mentioned herein and/or used in the Experimental Part).

[0342] According to another non-limiting aspect, an amino acid sequence or polypeptide of the invention that is directed against a heterodimeric cytokine (and that may further be as described herein) is such that, upon binding to the heterodimeric cytokine, it prevents, reduces or inhibits the signalling of the receptor that is triggered by the heterodimeric cytokine-mediated association of the receptor (i.e. compared to the signalling following heterodimeric cytokine-mediated association of the receptor without the presence of the amino acid sequence or polypeptide, and by at least 1%, such as by at least 5%, for example by at least 10%, at least 30%, at least 50%, at least 70% and up to 90% or more, as determined by a suitable assay, such as one of the assays mentioned herein and/or used in the Experimental Part).

[0343] Generally, according to a preferred aspect, an amino acid sequence or polypeptide of the invention that is directed against a heterodimeric cytokine (and that may further be as described herein) is such that, upon binding to the heterodimeric cytokine, it prevents, reduces or inhibits the heterodimeric cytokine-mediated signalling (as defined herein) associated with said heterodimeric cytokine and/or with its receptor (i.e. compared to the heterodimeric cytokine-mediated signalling mediated by the heterodimeric cytokines without the presence of the amino acid sequence or polypeptide, and by at least 1%, such as by at least 5%, for example by at least 10%, at least 30%, at least 50%, at least 70% and up to 90% or more, as determined by a suitable assay, such as one of the assays mentioned herein and/or used in the Experimental Part).

[0344] Again, such amino acid sequences and polypeptides may all be as further described herein.

[0345] When an amino acid sequence (such as the p19+ sequences, p19− sequences, p40+ sequences, p40− sequences, p35 sequences, IL-27 sequences, IL-12Rb1 sequences, IL-12Rb2 sequences and IL-23 sequences described herein) or polypeptide (such as the—for example multivalent, multispecific and/or biparatopic—constructs described herein that comprise at least one p19+ sequence, p19− sequence, p40+ sequence, p40− sequence, p35 sequence, IL-27 sequence, IL-12Rb1 sequence, IL-12Rb2 sequence and/or IL-23 sequence) of the invention is directed against a receptor for a heterodimeric cytokine, it may modulate (as defined herein) heterodimeric cytokine-mediated signalling (as defined herein) in several different ways. For example, and although the invention in its broadest sense is not limited to any specific explanation, hypothesis or mechanism, it may be that such an amino acid sequence or polypeptide, upon binding to the receptor (or to at least one subunit thereof):
[0346] prevents, reduces or inhibits (in part or in full) binding of the ligand (i.e. of the heterodimeric cytokine that is the ligand of the receptor) to the receptor (or to at least one subunit thereof);
[0347] still allows the ligand to bind to the receptor, but prevents, reduces or inhibits the signalling that would normally be triggered by binding of the ligand to the receptor (for example, and without limitation, influencing the conformation of the receptor or by reducing the ability of the receptor to change its confirmation)
[0348] prevents, reduces, inhibits the activation and/or association (e.g. dimerization) of the receptor (e.g. of its subunits), and in particular the association of the receptor that is triggered by binding of the ligand (i.e. of the heterodimeric cytokine that is the ligand of the receptor) to the receptor (or to at least one subunit thereof), as is for example the case for the the IL-23 receptor, see Parham et al., supra;
[0349] still allows ligand-mediated association (e.g. dimerization) of the receptor, but prevents, reduces or inhibits the signalling that would normally be triggered by such association (for example, and without limitation, influencing the conformation of the associated receptor or by reducing the ability of the associated receptor to change its confirmation)
[0350] or otherwise prevents, reduces or inhibits the signalling that is caused by binding of the heterodimeric cytokine to its receptor or by ligand-mediated association of the receptor.

[0351] Thus, according to one non-limiting aspect, an amino acid sequence or polypeptide of the invention that is directed against a receptor for a heterodimeric cytokine (and that may further be as described herein) is such that, upon binding to the receptor (e.g. to at least one subunit thereof), it prevents, reduces or inhibits binding of its ligand to said receptor or to at least one subunit thereof (i.e. compared to the binding of the ligand to said receptor without the presence of the amino acid sequence or polypeptide, and by at least 1%, such as by at least 5%, for example by at least 10%, at least 30%, at least 50%, at least 70% and up to 90% or more, as determined by a suitable assay, such as one of the assays mentioned herein and/or used in the Experimental Part).

[0352] According to one non-limiting aspect, an amino acid sequence or polypeptide of the invention that is directed against a receptor for a heterodimeric cytokine (and that may further be as described herein) is such that, upon binding to the receptor (e.g. to at least one subunit thereof), allows the ligand to bind to the receptor, but prevents, reduces or inhibits the signalling that is (or normally would be) triggered by binding of the ligand to the receptor or to at least one subunit thereof (i.e. compared to the signalling upon binding of the ligand to said receptor without the presence of the amino acid sequence or polypeptide, and by at least 1%, such as by at least 5%, for example by at least 10%, at least 30%, at least 50%, at least 70% and up to 90% or more, as determined by a suitable assay, such as one of the assays mentioned herein and/or used in the Experimental Part).

[0353] According to another non-limiting aspect, an amino acid sequence or polypeptide of the invention that is directed against a receptor for a heterodimeric cytokine (and that may further be as described herein) is such that, upon binding to the receptor (or to at least one subunit thereof), it prevents, reduces or inhibits activation and/or association of the receptor, and in particular ligand-mediated association of the receptor (i.e. compared to the ligand-mediated association of the receptor without the presence of the amino acid sequence or polypeptide, and by at least 1%, such as by at least 5%, for example by at least 10%, at least 30%, at least 50%, at least 70% and up to 90% or more, as determined by a suitable assay, such as one of the assays mentioned herein and/or used in the Experimental Part).

[0354] According to another non-limiting aspect, an amino acid sequence or polypeptide of the invention that is directed against a receptor for a heterodimeric cytokine (and that may further be as described herein) is such that, upon binding to the receptor, it prevents, reduces or inhibits the signalling that is triggered by ligand-mediated association of the receptor (i.e. compared to the signalling following binding of the ligand to the receptor without the presence of the amino acid sequence or polypeptide, and by at least 1%, such as by at least 5%, for example by at least 10%, at least 30%, at least 50%, at least 70% and up to 90% or more, as determined by a suitable assay, such as one of the assays mentioned herein and/or used in the Experimental Part).

[0355] Generally, according to a preferred aspect, an amino acid sequence or polypeptide of the invention that is directed against a receptor for heterodimeric cytokine (and that may further be as described herein) is such that, upon binding to the receptor, it prevents, reduces or inhibits heterodimeric cytokine-mediated signalling (as defined herein) associated with said receptor and/or with its ligand (i.e. compared to the heterodimeric cytokine-mediated signalling without the presence of the amino acid sequence or polypeptide, and by at least 1%, such as by at least 5%, for example by at least 10%, at least 30%, at least 50%, at least 70% and up to 90% or more, as determined by a suitable assay, such as one of the assays mentioned herein and/or used in the Experimental Part).

[0356] Again, such amino acid sequences and polypeptides may all be as further described herein.

[0357] It will be clear to the skilled person that the above amino acid sequences and polypeptides of the invention will generally act as antagonists of heterodimeric cytokine-mediated signalling (by which is generally meant herein the signalling associated with the heterodimeric cytokine and/or with the receptor for the heterodimeric cytokine, and in particular the signalling that is caused by binding of a heterodimeric cytokine to its receptor, as well as the biological mechanisms and effects that are triggered by such signalling).

[0358] However, the invention also relates to amino acid sequences and polypeptides of the invention that act as agonists of heterodimeric cytokine-mediated signalling. For example, such agonists may be amino acid sequences or polypeptides of the invention that can bind to a receptor for a heterodimeric cytokine (such as the receptor for IL-12, IL-23, IL-27 or IL-35) or to at least one subunit thereof so as to trigger receptor mediated signalling. It is also expected that the some of the above-described bispecific polypeptides that comprise at least one amino acid sequence of the invention that is directed against a heterodimeric cytokine (or against at least one subunit thereof) and at least one amino acid sequence of the invention that is directed against a receptor for said heterodimeric cytokine (or against at least one subunit thereof) may act as agonists for heterodimeric cytokine-mediated signalling, as further described herein. For this purpose, such bispecific polypeptides preferably comprise amino acid sequences that do not neutralize binding of the heterodimeric cytokine to the receptor.

[0359] It is also within the scope of the invention to use parts, fragments, analogs, mutants, variants, alleles and/or derivatives of the amino acid sequences and polypeptides of the invention, and/or to use proteins or polypeptides comprising or essentially consisting of one or more of such parts, fragments, analogs, mutants, variants, alleles and/or derivatives, as long as these are suitable for the uses envisaged herein. Such parts, fragments, analogs, mutants, variants, alleles and/or derivatives will usually contain (at least part of) a functional antigen-binding site for binding against heterodimeric cytokines and/or their receptors; and more preferably will be capable of specific binding to heterodimeric cytokines and/or their receptors, and even more preferably capable of binding to heterodimeric cytokines and/or their receptors with an affinity (suitably measured and/or expressed as a K_{D}-value (actual or apparent), a K_{A}-value (actual or apparent), a kₒₙrate and/or a k_{off}-rate, or alternatively as an IC₅₀ value, as further described herein) that is as defined herein. Some non-limiting examples of such parts, fragments, analogs, mutants, variants, alleles, derivatives, proteins and/or polypeptides will become clear from the further description herein. Additional fragments or polypeptides of the invention may also be provided by suitably combining (i.e. by linking or genetic fusion) one or more (smaller) parts or fragments as described herein.

[0360] In one specific, but non-limiting aspect of the invention, which will be further described herein, such analogs, mutants, variants, alleles, derivatives have an increased half-life in serum (as further described herein) compared to the amino acid sequence from which they have been derived. For example, an amino acid sequence of the invention may be linked (chemically or otherwise) to one or more groups or moieties that extend the half-life (such as PEG), so as to provide a derivative of an amino acid sequence of the invention with increased half-life. In one specific, but non-limiting aspect, the amino acid sequences of the invention (such as the p19+ sequences, p19− sequences, p40+ sequences, p40− sequences, p35 sequences, IL-27 sequences, IL-12Rb I sequences, IL-12Rb2 sequences and IL-23 sequences described herein) may be amino acid sequences that comprise an immunoglobulin fold or may be amino acid sequences that, under suitable conditions (such as physiological conditions) are capable of forming an immunoglobulin fold (i.e. by folding). Reference is inter alia made to the review by Halaby et al., J. (1999) Protein Eng. 12, 563-71. Preferably, when properly folded so as to form an immunoglobulin fold, such an amino acid sequence is capable of specific binding (as defined herein) to heterodimeric cytokines and/or their receptors; and more preferably capable of binding to heterodimeric cytokines and/or their receptors with an affinity (suitably measured and/or expressed as a K_{D}-value (actual or apparent), a K_{A}-value (actual or apparent), a kₒₙ-rate and/or a k_{off}-rate, or alternatively as an IC₅₀ value, as further described herein) that is as defined herein. Also, parts, fragments, analogs, mutants, variants, alleles and/or derivatives of such amino acid sequences are preferably such that they comprise an immunoglobulin fold or are capable for forming, under suitable conditions, an immunoglobulin fold.

[0361] In particular, but without limitation, the amino acid sequences of the invention (such as the p19+ sequences, p19− sequences, p40+ sequences, p40− sequences, p35 sequences, IL-27 sequences, IL-12Rb1 sequences, IL-12Rb2 sequences and IL-23 sequences described herein) may be amino acid sequences that essentially consist of 4 framework regions (FR1 to FR4 respectively) and 3 complementarity determining regions (CDR1 to CDR3 respectively); or any suitable fragment of such an amino acid sequence (which will then usually contain at least some of the amino acid residues that form at least one of the CDR's, as further described herein).

[0362] The amino acid sequences of the invention (such as the p19+ sequences, p19− sequences, p40+ sequences, p40− sequences, p35 sequences, IL-27 sequences, IL-12Rb1 sequences, IL-12Rb2 sequences and IL-23 sequences described herein) may in particular be an immunoglobulin sequence or a suitable fragment thereof, and more in particular be an immunoglobulin variable domain sequence or a suitable fragment thereof, such as light chain variable domain sequence (e.g. a V_{L}-sequence) or a suitable fragment thereof; or a heavy chain variable domain sequence (e.g. a V_{H}-sequence) or a suitable fragment thereof. When the amino acid sequence of the invention is a heavy chain variable domain sequence, it may be a heavy chain variable domain sequence that is derived from a conventional four-chain antibody (such as, without limitation, a V_{H} sequence that is derived from a human antibody) or be a so-called V_{HH}-sequence (as defined herein) that is derived from a so-called “heavy chain antibody” (as defined herein).

[0363] However, it should be noted that the invention is not limited as to the origin of the amino acid sequence of the invention (or of the nucleotide sequence of the invention used to express it), nor as to the way that the amino acid sequence or nucleotide sequence of the invention is (or has been) generated or obtained. Thus, the amino acid sequences of the invention may be naturally occurring amino acid sequences (from any suitable species) or synthetic or semi-synthetic amino acid sequences. In a specific but non-limiting aspect of the invention, the amino acid sequence is a naturally occurring immunoglobulin sequence (from any suitable species) or a synthetic or semi-synthetic immunoglobulin sequence, including but not limited to “humanized” (as defined herein) immunoglobulin sequences (such as partially or fully humanized mouse or rabbit immunoglobulin sequences, and in particular partially or fully humanized V_{HH} sequences or Nanobodies), “camelized” (as defined herein) immunoglobulin sequences, as well as immunoglobulin sequences that have been obtained by techniques such as affinity maturation (for example, starting from synthetic, random or naturally occurring immunoglobulin sequences), CDR grafting, veneering, combining fragments derived from different immunoglobulin sequences, PCR assembly using overlapping primers, and similar techniques for engineering immunoglobulin sequences well known to the skilled person; or any suitable combination of any of the foregoing. Reference is for example made to the standard handbooks, as well as to the further description and prior art mentioned herein.

[0364] Similarly, the nucleotide sequences of the invention may be naturally occurring nucleotide sequences or synthetic or semi-synthetic sequences, and may for example be sequences that are isolated by PCR from a suitable naturally occurring template (e.g. DNA or RNA isolated from a cell), nucleotide sequences that have been isolated from a library (and in particular, an expression library), nucleotide sequences that have been prepared by introducing mutations into a naturally occurring nucleotide sequence (using any suitable technique known per se, such as mismatch PCR), nucleotide sequence that have been prepared by PCR using overlapping primers, or nucleotide sequences that have been prepared using techniques for DNA synthesis known per se.

[0365] The amino acid sequences of the invention (such as the p19+ sequences, p19− sequences, p40+ sequences, p40− sequences, p35 sequences, IL-27 sequences, IL-12Rb1 sequences, IL-12Rb2 sequences and IL-23 sequences described herein) may in particular be a domain antibody (or an amino acid sequence that is suitable for use as a domain antibody), a single domain antibody (or an amino acid sequence that is suitable for use as a single domain antibody), a “dAb” (or an amino acid sequence that is suitable for use as a dAb) or a Nanobody™ (as defined herein, and including but not limited to a V_{HH} sequence); other single variable domains, or any suitable fragment of any one thereof. For a general description of (single) domain antibodies, reference is also made to the prior art cited above, as well as to EP 0 368 684. For the term “dAb's”, reference is for example made to Ward et al. (Nature 1989 Oct. 12; 341 (6242): 544-6), to Holt et al., Trends Biotechnol., 2003, 21(10:484-490; as well as to for example WO 06/030220, WO 06/003388 and other published patent applications of Domantis Ltd. It should also be noted that, although less preferred in the context of the present invention because they are not of mammalian origin, single domain antibodies or single variable domains can be derived from certain species of shark (for example, the so-called “IgNAR domains”, see for example WO 05/18629).

[0366] In particular, the amino acid sequence of the invention may be a Nanobody™ (as defined herein) or a suitable fragment thereof. [Note: Nanobody™, Nanobodies™ and Nanoclone™ are registered trademarks of Ablynx N.V.] Such Nanobodies directed against heterodimeric cytokines and/or their receptors will also be referred to herein as “Nanobodies of the invention”.

[0367] For a general description of Nanobodies, reference is made to the further description below, as well as to the prior art cited herein. In this respect, it should however be noted that this description and the prior art mainly described Nanobodies of the so-called “V_{H}3 class” (i.e. Nanobodies with a high degree of sequence homology to human germline sequences of the V_{H}3 class such as DP-47, DP-51 or DP-29), which Nanobodies form a preferred aspect of this invention. It should however be noted that the invention in its broadest sense generally covers any type of Nanobody directed against heterodimeric cytokines and/or their receptors, and for example also covers the Nanobodies belonging to the so-called “V_{H}4 class” (i.e. Nanobodies with a high degree of sequence homology to human germline sequences of the V_{H}4 class such as DP-78), as for example described in the U.S. provisional application 60/792,279 by Ablynx N.V. entitled “DP-78-like Nanobodies” filed on Apr. 14, 2006 (see also PCT/EP2007/003259 and WO 07/118670).

[0368] Generally, Nanobodies (in particular V_{HH} sequences and partially humanized Nanobodies) can in particular be characterized by the presence of one or more “Hallmark residues” (as described herein) in one or more of the framework sequences (again as further described herein).

[0369] Thus, generally, a Nanobody can be defined as an amino acid sequence with the (general) structure
[0370] FR1-CDR1-FR2-CDR2-FR3-CDR3-FR4

[0371] in which FR1 to FR4 refer to framework regions 1 to 4, respectively, and in which CDR1 to CDR3 refer to the complementarity determining regions 1 to 3, respectively, and in which one or more of the Hallmark residues are as further defined herein.

[0372] In particular, a Nanobody can be an amino acid sequence with the (general) structure
[0373] FR1-CDR1-FR2-CDR2-FR3-CDR3-FR4

[0374] in which FR1 to FR4 refer to framework regions 1 to 4, respectively, and in which CDR1 to CDR3 refer to the complementarity determining regions 1 to 3, respectively, and in which the framework sequences are as further defined herein.

[0375] More in particular, a Nanobody can be an amino acid sequence with the (general) structure
[0376] FR1-CDR1-FR2-CDR2-FR3-CDR3-FR4

[0377] in which FR1 to FR4 refer to framework regions 1 to 4, respectively, and in which CDR1 to CDR3 refer to the complementarity determining regions 1 to 3, respectively, and in which:
[0378] i) preferably one or more of the amino acid residues at positions 11, 37, 44, 45, 47, 83, 84, 103, 104 and 108 according to the Kabat numbering are chosen from the Hallmark residues mentioned in Table A-4 below; and in which:
[0379] ii) said amino acid sequence has at least 80% amino acid identity with at least one of the amino acid sequences of SEQ ID NO's: 1 to 22, in which for the purposes of determining the degree of amino acid identity, the amino acid residues that form the CDR sequences (indicated with X in the sequences of SEQ ID NO's: 1 to 22) are disregarded.

[0380] In these Nanobodies, the CDR sequences are generally as further defined herein.

[0381] Thus, the invention also relates to such Nanobodies that can bind to (as defined herein) and/or are directed against heterodimeric cytokines and/or their receptors, to suitable fragments thereof, as well as to polypeptides that comprise or essentially consist of one or more of such Nanobodies and/or suitable fragments.
[0382] Some (other) examples of suitable framework sequences are:
[0383] For framework 1: the framework 1 sequences of FR1 Sequences Group 1; FR1 Sequences Group 8; FR1 Sequences Group 15; FR1 Sequences Group 22; FR1 Sequences Group 29; FR1 Sequences Group 36; FR1 Sequences Group 43; FR1 Sequences Group 50 and/or FR1 Sequences Group 57 (see Table A-1 below), or amino acid sequences that have no more than 5, such as 4, 3, 2, or only 1 amino acid difference (as defined herein) with one or more of said framework 1 sequences (in which case Optional Condition I. Optional Condition II and/or Optional Condition IV (as defined herein) may apply);
[0384] For framework 2: the framework 2 sequences of FR2 Sequences Group 3; FR2 Sequences Group 10; FR2 Sequences Group 17; FR2 Sequences Group 24; FR2 Sequences Group 31; FR2 Sequences Group 38; FR2 Sequences Group 45; FR2 Sequences Group 52 and/or FR2 Sequences Group 59 (see Table A-1 below), or amino acid sequences that have no more than 5, such as 4, 3, 2, or only 1 amino acid difference (as defined herein) with one or more of said framework 1 sequences (in which case Optional Condition I. Optional Condition II and/or Optional Condition IV (as defined herein) may apply);
[0385] For framework 3: the framework 3 sequences of FR3 Sequences Group 5; FR3 Sequences Group 12; FR3 Sequences Group 19; FR3 Sequences Group 26; FR3 Sequences Group 33; FR3 Sequences Group 40; FR3 Sequences Group 47; FR3 Sequences Group 54 and/or FR3 Sequences Group 61 (see Table A-1 below), or amino acid sequences that have no more than 5, such as 4, 3, 2, or only 1 amino acid difference (as defined herein) with one or more of said framework 1 sequences (in which case Optional Condition I. Optional Condition II and/or Optional Condition IV (as defined herein) may apply);
[0386] For framework 4: the framework 4 sequences of FR4 Sequences Group 7; FR4 Sequences Group 14; FR4 Sequences Group 21; FR4 Sequences Group 28; FR4 Sequences Group 35; FR4 Sequences Group 42; FR4 Sequences Group 49; FR4 Sequences Group 56 and/or FR4 Sequences Group 63 (see Table A-1 below), or amino acid sequences that have no more than 5, such as 4, 3, 2, or only 1 amino acid difference (as defined herein) with one or more of said framework 1 sequences (in which case Optional Condition I. Optional Condition H and/or Optional Condition IV (as defined herein) may apply);

[0387] In the further description herein, reference will be made to certain groups of amino acid sequences (i.e. framework sequences and CDR sequences). These groups of amino acid sequences (63 in total) are defined in Table A-1 below:

TABLE A-1
Framework sequences and CDR sequences referred to in this specification.
The SEQ ID NO's refer to the SEQ ID NO’s given in the sequence
listing and in FIG. 11 to 19, respectively.

Framework sequences and CDR sequences derived from p19+ Nanobodies
(see also FIG. 11)
FR1 Sequences Group 1: SEQ ID NO's: 126 to 136 and 2170 to 2175
CDR1 Sequences Group 2: SEQ ID NO's: 378 to 388 and 2215 to 2220
FR2 Sequences Group 3: SEQ ID NO's: 630 to 640 and 2260 to 2265
CDR2 Sequences Group 4: SEQ ID NO's: 882 to 892 and 2305 to 2310
FR3 Sequences Group 5: SEQ ID NO's: 1134 to 1144 and 2350 to 2355
CDR3 Sequences Group 6: SEQ ID NO's: 1386 to 1396 and 2395 to 2400
FR4 Sequences Group 7: SEQ ID NO's: 1638 to 1648 and 2440 to 2445
Framework sequences and CDR sequences derived from p19− Nanobodies
(see also FIG. 12)
FR1 Sequences Group 8: SEQ ID NO's: 137 to 175 and 2187 to 2188
CDR1 Sequences Group 9: SEQ ID NO's: 389 to 427 and 2232 to 2233
FR2 Sequences Group 10: SEQ ID NO's: 641 to 679 and 2277 to 2278
CDR2 Sequences Group 11: SEQ ID NO's: 893 to 931 and 2322 to 2323
FR3 Sequences Group 12: SEQ ID NO's: 1145 to 1183 and 2367 to 2368
CDR3 Sequences Group 13: SEQ ID NO's: 1397 to 1435 and 2412 to 2413
FR4 Sequences Group 14: SEQ ID NO's: 1649 to 1687 and 2457 to 2458
Framework sequences and CDR sequences derived from p40− Nanobodies
(see also FIG. 13)
FR1 Sequences Group 15: SEQ ID NO's: 176 to 181 and 191; 194; 204; 207;
208; 210 to 216; 219; 222; 225; 227; 228; 232; 238; 240; 242; 243; 259; 260; 264; 269
and 2189 to 2194
CDR1 Sequences Group 16: SEQ ID NO's: 428 to 433 and 443; 446; 456; 459;
460; 462 to 468; 471; 474; 477; 479; 480: 484; 490; 492; 494: 495; 511; 512; 516; 521
and 2234 to 2239
FR2 Sequences Group 17: SEQ ID NO's: 680 to 685 and 695; 698; 708; 711;
712; 714 to 720; 723; 726; 729; 731; 732; 736; 742; 744; 746; 747; 763; 764; 768; 773
and 2279 to 2284
CDR2 Sequences Group 18: SEQ ID NO's: 932 to 937 and 947; 950; 960; 963;
964; 966 to 972; 975; 978: 981; 983; 984; 988; 994; 996; 998; 999; 1015; 1016; 1020;
1025 and 2324 to 2329
FR3 Sequences Group 19: SEQ ID NO's: 1184 to 1189 and 1199; 1202; 1212;
1215; 1216; 1218 to 1224; 1227; 1230; 1233; 1235; 1236; 1240; 1246; 1248; 1250;
1251; 1267; 1268; 1272; 1277 and 2369 to 2374
CDR3 Sequences Group 20: SEQ ID NO's: 1436 to 1441 and 1451; 1454; 1464;
1467; 1468; 1470 to 1476; 1479; 1482; 1485; 1487; 1488; 1492; 1498; 1500; 1502;
1503; 1519; 1520; 1524; 1529 and 2414 to 2419
FR4 Sequences Group 21: SEQ ID NO's: 1688 to 1693 and 1703; 1706; 1716;
1719: 1720; 1722 to 1728; 1731; 1734; 1737; 1739; 1740; 1744; 1750; 1752; 1754;
1755; 1771; 1772; 1776; 1781 and 2459 to 2464
Framework sequences and CDR sequences derived from p40+ Nanobodies
(see also FIG. 13)
FR1 Sequences Group 22: SEQ ID NO's: 178; 182; 184; 186; 188; 189; 190;
192; 193; 195; 198 to 201; 203; 205; 206; 209; 217; 218; 220; 221; 223; 224; 226; 229;
230; 231; 233 to 237; 239; 241; 266 and 2195 to 2213
CDR1 Sequences Group 23: SEQ ID NO's: 430; 434; 436; 438; 440; 441; 442;
444; 445; 447; 450 to 453; 455; 457; 458; 461; 469; 470; 472; 473; 475; 476; 478; 481;
482; 483; 485 to 489; 491; 493; 518 and 2240 to 2258
FR2 Sequences Group 24: SEQ ID NO's: 682; 686; 688; 690; 692; 693; 694;
696; 697; 699; 702 to 705; 707; 709; 710; 713; 721; 722; 724; 725; 727; 728; 730; 733;
734; 735; 737 to 741; 743; 745; 770 and 2285 to 2303
CDR2 Sequences Group 25: SEQ ID NO's: 934; 938; 940; 942; 944; 945; 946;
948; 949; 951; 954 to 957; 959; 961; 962; 965; 973; 974; 976; 977; 979; 980; 982; 985;
986; 987; 989 to 993; 995; 997; 1022 and 2330 to 2348
FR3 Sequences Group 26: SEQ ID NO's: 1186; 1190; 1192; 1194; 1196; 1197;
1198; 1200; 1201; 1203; 1206 to 1209; 1211; 1213; 1214; 1217; 1225; 1226; 1228;
1229; 1231; 1232; 1234; 1237; 1238; 1239; 1241 to 1245; 1247; 1249; 1274 and 2375
to 2393
CDR3 Sequences Group 27: SEQ ID NO's: 1438; 1442; 1444; 1446; 1448; 1449;
1450; 1452; 1453; 1455; 1458 to 1461; 1463; 1465; 1466; 1469; 1477; 1478; 1480;
1481; 1483; 1484; 1486; 1489; 1490; 1491; 1493 to 1497; 1499; 1501; 1526 and 2420
to 2438
FR4 Sequences Group 28: SEQ ID NO's: 1690; 1694; 1696; 1698; 1700; 1701;
1702; 1704; 1705; 1707; 1710 to 1713; 1715; 1717; 1718; 1721; 1729; 1730; 1732;
1733; 1735; 1736; 1738; 1741; 1742; 1743; 1745 to 1749; 1751; 1753; 1778 and 2465
to 2483
Framework sequences and CDR sequences derived from p35 Nanobodies
(see also FIG. 15)
FR1 Sequences Group 29: SEQ ID NO's: 183; 185; 187; 196; 197; 202; 244 to
258; 261 to 263; 265; 267; 268; 270 to 273 and 2214
CDR1 Sequences Group 30: SEQ ID NO's: 435; 437; 439; 448; 449; 454; 496 to
510; 513 to 515; 517; 519; 520; 522 to 525 and 2259
FR2 Sequences Group 31: SEQ ID NO's: 687; 689; 691; 700; 701; 706; 748 to
762; 765 to 767; 769; 771; 772; 774 to 777 and 2304
CDR2 Sequences Group 32: SEQ ID NO's: 939; 941; 943; 952; 953; 958; 1000
to 1014; 1017 to 1019; 1021; 1023; 1024; 1026 to 1029 and 2349
FR3 Sequences Group 33: SEQ ID NO's: 1191; 1193; 1195; 1204; 1205; 1210;
1252 to 1266; 1269 to 1271; 1273; 1275; 1276; 1278 to 1281 and 2394
CDR3 Sequences Group 34: SEQ ID NO's: 1443; 1445; 1447; 1456; 1457; 1462;
1504 to 1518; 1521 to 1523; 1525; 1527; 1528; 1530 to 1533 and 2439
FR4 Sequences Group 35: SEQ ID NO's: 1695; 1697; 1699; 1708; 1709; 1714;
1756 to 1770; 1773 to 1775; 1777; 1779; 1780; 1782 to 1785 and 2484
FR sequences and CDR sequences derived from Nanobodies against
IL-27 (see also FIG. 16)
FR1 Sequences Group 36: SEQ ID NO's: 274 to 312
CDR1 Sequences Group 37: SEQ ID NO's: 526 to 564
FR2 Sequences Group 38: SEQ ID NO's: 778 to 816
CDR2 Sequences Group 39: SEQ ID NO's: 1030 to 1068
FR3 Sequences Group 40: SEQ ID NO's: 1282 to 1320
CDR3 Sequences Group 41: SEQ ID NO's: 1534 to 1572
FR4 Sequences Group 42: SEQ ID NO's: 1786 to 1824
FR sequences and CDR sequences derived from Nanobodies against
IL-12Rb1 (see also FIG. 17)
FR1 Sequences Group 43: SEQ ID NO's: 313 to 339
CDR1 Sequences Group 44: SEQ ID NO's: 565 to 591
FR2 Sequences Group 45: SEQ ID NO's: 817 to 843
CDR2 Sequences Group 46: SEQ ID NO's: 1069 to 1095
FR3 Sequences Group 47: SEQ ID NO's: 1321 to 1347
CDR3 Sequences Group 48: SEQ ID NO's: 1573 to 1599
FR4 Sequences Group 49: SEQ ID NO's: 1825 to 1851
FR sequences and CDR sequences derived from Nanobodies against
IL-12Rb2 (see also FIG. 18)
FR1 Sequences Group 50: SEQ ID NO's: 340 to 360
CDR1 Sequences Group 51: SEQ ID NO's: 592 to 612
FR2 Sequences Group 52: SEQ ID NO's: 844 to 864
CDR2 Sequences Group 53: SEQ ID NO's: 1096 to 1116
FR3 Sequences Group 54: SEQ ID NO's: 1348 to 1368
CDR3 Sequences Group 55: SEQ ID NO's: 1600 to 1620
FR4 Sequences Group 56: SEQ ID NO's: 1852 to 1872
FR sequences and CDR sequences derived from Nanobodies against
IL-23R (see also FIG. 19)
FR1 Sequences Group 57: SEQ ID NO's: 361 to 377
CDR1 Sequences Group 58: SEQ ID NO's: 613 to 629
FR2 Sequences Group 59: SEQ ID NO's: 865 to 881
CDR2 Sequences Group 60: SEQ ID NO's: 1117 to 1133
FR3 Sequences Group 61: SEQ ID NO's: 1369 to 1385
CDR3 Sequences Group 62: SEQ ID NO's: 1621 to 1637
FR4 Sequences Group 63: SEQ ID NO's: 1873 to 1889

[0388] Also, in the description herein, reference will be made to certain groups of amino acid sequences that form complete single antigen-binding domains (in this particular case, Nanobody sequences). These groups of sequences are defined in Table A-2 below:

TABLE A-2
Non-limiting examples of P19+ sequences, p19− sequences,
P40− sequences, P40+ sequences, P35 sequences, IL-27 sequences,
IL-12Rb1 sequences, IL-12Rb2 sequences and IL-23R sequences of the
invention. The SEQ ID NO's refer to the SEQ ID NO's given in the
sequence listing and in FIGS. 20 to 27, respectively.

| Group name | SEQ ID NO's |
|---|---|
| “P19+ sequences” (see also FIG. 20) | SEQ ID NO's: 1890; 1891; 1892; |
| | 1893; 1894; 1895; 1896; 1897; 1898; 1899; |
| | 1900; 2485; 2486; 2487; 2488; 2489 and/or |
| | 2490 |
| “P19− sequences” (see also FIG. 21) | SEQ ID NO's: 1901; 1902; 1903; |
| | 1904; 1905; 1906; 1907; 1908; 1909; 1910; |
| | 1911; 1912; 1913; 1914; 1915; 1916; 1917; |
| | 1918; 1919; 1920: 1921; 1922; 1923; 1924; |
| | 1925; 1926; 1927; 1928; 1929; 1930; 1931; |
| | 1932; 1933; 1934; 1935: 1936; 1937; 1938; |
| | 1939; 2502 and/or 2503 |
| “P40− sequences” (see also FIG. 22) | SEQ ID NO's: 1940; 1941; 1942; |
| | 1943; 1944; 1945; 1955; 1958; 1968; 1971; |
| | 1972; 1974; 1975; 1976; 1977; 1978; 1979; |
| | 1980; 1983; 1986; 1989; 1991; 1992; 1996; |
| | 2002; 2004; 2006; 2007; 2023; 2024; 2028; |
| | 2033; 2504; 2505; 2506; 2507; 2508 and/or |
| | 2509 |
| “P40+ sequences” (see also FIG. 23) | SEQ ID NO's: 1942; 1946; 1948; |
| | 1950; 1952; 1953; 1954; 1956; 1957; 1959; |
| | 1962; 1963; 1964; 1965; 1967; 1969; 1970; |
| | 1973; 1981; 1982; 1984; 1985; 1987; 1988; |
| | 1990; 1993; 1994; 1995; 1997; 1998; 1999; |
| | 2000; 2001; 2003; 2005; 2030; 2510; 2511; |
| | 2512; 2513; 2514; 2515; 2516; 2517; 2518; |
| | 2519; 2520; 2521; 2522; 2523; 2524: 2525; |
| | 2526; 2527 and/or 2528 |
| “P35 sequences” (see also FIG. 24) | SEQ ID NO's: 1947; 1949; 1951; |
| | 1960; 1961; 1966; 2008; 2009; 2010; 2011; |
| | 2012; 2013; 2014; 2015; 2016; 2017; 2018; |
| | 2019; 2020; 2021; 2022; 2025; 2026; 2027; |
| | 2029; 2031; 2032; 2034: 2035; 2036; 2037 |
| | and/or 2529 |
| “IL-27 sequences” (see also FIG. 26) | SEQ ID NO's: 2038; 2039; 2040; |
| | 2041; 2042; 2043; 2044; 2045; 2046; 2047; |
| | 2048; 2049; 2050; 2051; 2052; 2053; 2054; |
| | 2055; 2056; 2057; 2058; 2059; 2060; 2061; |
| | 2062; 2063; 2064; 2065; 2066; 2067; 2068; |
| | 2069; 2070; 2071; 2072; 2073; 2074; 2075 |
| | and/or 2076 |
| “IL-12Rb1 sequences” (see also FIG. 27) | SEQ ID NO's: 2077; 2078; 2079; |
| | 2080; 2081; 2082; 2083; 2084; 2085; 2086; |
| | 2087; 2088; 2089; 2090; 2091; 2092; 2093; |
| | 2094; 2095; 2096; 2097; 2098; 2099; 2100; |
| | 2101; 2102 and/or 2103 |
| “IL-12Rb2 sequences” (see also FIG. 28) | SEQ ID NO's: 2104; 2105; 2106; |
| | 2107; 2108; 2109; 2110; 2111; 2112; 2113; |
| | 2114; 2115; 2116; 2117; 2118; 2119; 2120; |
| | 2121; 2122; 2123 and/or 2124 |
| “IL-23R sequences” (see also FIG. 29) | SEQ ID NO's: 2125; 2126; 2127; |
| | 2128; 2129; 2130; 2131; 2132; 2133; 2134; |
| | 2135; 2136; 2137; 2138; 2139; 2140 and/or |
| | 2141 |

[0389] In particular, the invention in some specific aspects provides:
[0390] amino acid sequences that are directed against (as defined herein) p19 and that have at least 80%, preferably at least 85%, such as 90% or 95% or more sequence identity with at least one of the p19+ sequences listed in Table A-2 above. These amino acid sequences are preferably such that they neutralize binding of IL-23 to its receptor;
[0391] amino acid sequences that cross-block (as defined herein) the binding of at least one of the p19+ sequences listed in Table A-2 above to p19 and/or that compete with at least one of the p19+ sequences listed in Table A-2 above for binding to p19.
[0392] amino acid sequences that are directed against (as defined herein) p19 and that have at least 80%, preferably at least 85%, such as 90% or 95% or more sequence identity with at least one of the p19− sequences listed in Table A-2 above. These amino acid sequences are preferably such that they essentially do not block or neutralize binding of IL-23 to its receptor;
[0393] amino acid sequences that cross-block (as defined herein) the binding of at least one of the p19− sequences listed in Table A-2 above to p19 and/or that compete with at least one of the p19− sequences listed in Table A-2 above for binding to p19.
[0394] amino acid sequences that are directed against (as defined herein) p40 and that have at least 80%, preferably at least 85%, such as 90% or 95% or more sequence identity with at least one of the p40+ sequences listed in Table A-2 above. These amino acid sequences are preferably such that they neutralize binding of IL-23 and/or IL-12 to its receptor;
[0395] amino acid sequences that cross-block (as defined herein) the binding of at least one of the p40+ sequences listed in Table A-2 above to p40 and/or that compete with at least one of the p40+ sequences listed in Table A-2 above for binding to p40.
[0396] amino acid sequences that are directed against (as defined herein) p40 and that have at least 80%, preferably at least 85%, such as 90% or 95% or more sequence identity with at least one of the p40− sequences listed in Table A-2 above. These amino acid sequences are preferably such that they essentially do not block or neutralize binding of IL-23 or of IL-12 to its receptor;
[0397] amino acid sequences that cross-block (as defined herein) the binding of at least one of the p40− sequences listed in Table A-2 above to p40 and/or that compete with at least one of the p40− sequences listed in Table A-2 above for binding to p40.
[0398] amino acid sequences that are directed against (as defined herein) p35 and that have at least 80%, preferably at least 85%, such as 90% or 95% or more sequence identity with at least one of the p35 sequences listed in Table A-2 above.
[0399] amino acid sequences that cross-block (as defined herein) the binding of at least one of the p35 sequences listed in Table A-2 above to p35 and/or that compete with at least one of the p35 sequences listed in Table A-2 above for binding to p35.
[0400] amino acid sequences that are directed against (as defined herein) IL-12 and that have at least 80%, preferably at least 85%, such as 90% or 95% or more sequence identity with at least one of the p35 sequences, p40+ sequences and/or p40− sequences listed in Table A-2 above;
[0401] amino acid sequences that cross-block (as defined herein) the binding of at least one of the p35 sequences, p40+ sequences and/or p40− sequences listed in Table A-2 above to IL-12 and/or that compete with at least one of the p35 sequences, p40+ sequences and/or p40− sequences listed in Table A-2 above for binding to IL-12.
[0402] amino acid sequences that are directed against (as defined herein) IL-23 and that have at least 80%, preferably at least 85%, such as 90% or 95% or more sequence identity with at least one of the p19+ sequences, p19− sequences, p40+ sequences and/or p40− sequences listed in Table A-2 above;
[0403] amino acid sequences that cross-block (as defined herein) the binding of at least one of the p19+ sequences, p19− sequences, p40+ sequences and/or p40− sequences listed in Table A-2 above to IL-23 and/or that compete with at least one of the p19+ sequences, p19− sequences, p40+ sequences and/or p40− sequences listed in Table A-2 above for binding to IL-23.
[0404] amino acid sequences that are directed against (as defined herein) IL-27 and that have at least 80%, preferably at least 85%, such as 90% or 95% or more sequence identity with at least one of the IL-27 sequences listed in Table A-2 above;
[0405] amino acid sequences that cross-block (as defined herein) the binding of at least one of the IL-27 sequences listed in Table A-2 above to IL-27 and/or that compete with at least one of the IL-27 sequences listed in Table A-2 above for binding to IL-27.
[0406] amino acid sequences that are directed against (as defined herein) IL-12Rb1 and that have at least 80%, preferably at least 85%, such as 90% or 95% or more sequence identity with at least one of the IL-12Rb1 sequences listed in Table A-2 above;
[0407] amino acid sequences that cross-block (as defined herein) the binding of at least one of the IL-12Rb1 sequences listed in Table A-2 aboveto IL-12Rb1 and/or that compete with at least one of the IL-12Rb1 sequences listed in Table A-2 above for binding to IL-12Rb1.
[0408] amino acid sequences that are directed against (as defined herein) the (cognate) receptor for IL-12 and/or the (cognate) receptor for IL-23 and that have at least 80%, preferably at least 85%, such as 90% or 95% or more sequence identity with at least one of the IL-12Rb1 sequences listed in Table A-2 above;
[0409] amino acid sequences that cross-block (as defined herein) the binding of at least one of the IL-12Rb1 sequences listed in Table A-2 above to the (cognate) receptor for IL-12 and/or the (cognate) receptor for IL-23 and/or that compete with at least one of the IL-12Rb1 sequences listed in Table A-2 above for binding to the (cognate) receptor for IL-12 and/or the (cognate) receptor for IL-23.
[0410] amino acid sequences that are directed against (as defined herein) IL-12Rb2 and that have at least 80%, preferably at least 85%, such as 90% or 95% or more sequence identity with at least one of the IL-12Rb2 sequences listed in Table A-2 above;
[0411] amino acid sequences that cross-block (as defined herein) the binding of at least one of the IL-12Rb2 sequences listed in Table A-2 above and/or that compete with at least one of the IL-12Rb2 sequences listed in Table A-2 above for binding to IL-12Rb2;
[0412] amino acid sequences that are directed against (as defined herein) the (cognate) receptor for IL-12 and that have at least 80%, preferably at least 85%, such as 90% or 95% or more sequence identity with at least one of the IL-12Rb2 sequences listed in Table A-2 above;
[0413] amino acid sequences that cross-block (as defined herein) the binding of at least one of the IL-12Rb2 sequences listed in Table A-2 above to the (cognate) receptor for IL-12 and/or that compete with at least one of the IL-12Rb2 sequences listed in Table A-2 above for binding to the (cognate) receptor for IL-12.
[0414] amino acid sequences that are directed against (as defined herein) IL-23R and that have at least 80%, preferably at least 85%, such as 90% or 95% or more sequence identity with at least one of the IL-23R sequences listed in Table A-2;
[0415] amino acid sequences that cross-block (as defined herein) the binding of at least one of the IL-23R sequences listed in Table A-2 to IL-23R and/or that compete with at least one of the IL-23R sequences listed in Table A-2;
[0416] amino acid sequences that are directed against (as defined herein) the (cognate) receptor for IL-23 and that have at least 80%, preferably at least 85%, such as 90% or 95% or more sequence identity with at least one of the IL-23R sequences listed in Table A-2 above;
[0417] amino acid sequences that cross-block (as defined herein) the binding of at least one of the IL-23R sequences listed in Table A-2 above to the (cognate) receptor for IL-23 and/or that compete with at least one of the IL-23R sequences listed in Table A-2 above for binding to the (cognate) receptor for IL-23.
   which amino acid sequences may be as further described herein (and may for example be Nanobodies); as well as polypeptides of the invention that comprise one or more of such amino acid sequences (which may be as further described herein, and may for example be bispecific and/or biparatopic polypeptides as described herein), and nucleic acid sequences that encode such amino acid sequences and polypeptides.

[0418] Accordingly, some particularly preferred Nanobodies of the invention are Nanobodies which can bind (as further defined herein) to and/or are directed against to heterodimeric cytokines and/or their receptors and which:
[0419] i) have at least 80% amino acid identity with at least one of the amino acid sequences of SEQ ID NO's: 1890 to 2141, 2485 to 2529 and/or 2559 to 2614, in which for the purposes of determining the degree of amino acid identity, the amino acid residues that form the CDR sequences are disregarded. In this respect, reference is also made to the various groups of Framework 1 sequences, Framework 2 sequences, Framework 3 sequences and Framework 4 sequences mentioned Table A-1 (see also FIGS. 11 to 19) (with respect to the amino acid residues at positions 1 to 4 and 27 to 30 of the framework 1 sequences, reference is also made to the comments made below. Thus, for determining the degree of amino acid identity, these residues are preferably disregarded);

[0420] and in which:
[0421] ii) preferably one or more of the amino acid residues at positions 11, 37, 44, 45, 47, 83, 84, 103, 104 and 108 according to the Kabat numbering are chosen from the Hallmark residues mentioned in Table A-4 below.

[0422] In these Nanobodies, the CDR sequences are generally as further defined herein.

[0423] Again, such Nanobodies may be derived in any suitable manner and from any suitable source, and may for example be naturally occurring V_{HH} sequences (i.e. from a suitable species of Camelid) or synthetic or semi-synthetic amino acid sequences, including but not limited to “humanized” (as defined herein) Nanobodies, “camelized” (as defined herein) immunoglobulin sequences (and in particular camelized heavy chain variable domain sequences), as well as Nanobodies that have been obtained by techniques such as affinity maturation (for example, starting from synthetic, random or naturally occurring immunoglobulin sequences), CDR grafting, veneering, combining fragments derived from different immunoglobulin sequences, PCR assembly using overlapping primers, and similar techniques for engineering immunoglobulin sequences well known to the skilled person; or any suitable combination of any of the foregoing as further described herein. Also, when a Nanobody comprises a V_{HH} sequence, said Nanobody may be suitably humanized, as further described herein, so as to provide one or more further (partially or fully) humanized Nanobodies of the invention. Similarly, when a Nanobody comprises a synthetic or semi-synthetic sequence (such as a partially humanized sequence), said Nanobody may optionally be further suitably humanized, again as described herein, again so as to provide one or more further (partially or fully) humanized Nanobodies of the invention.

[0424] In particular, humanized Nanobodies may be amino acid sequences that are as generally defined for Nanobodies in the previous paragraphs, but in which at least one amino acid residue is present (and in particular, in at least one of the framework residues) that is and/or that corresponds to a humanizing substitution (as defined herein). Some preferred, but non-limiting humanizing substitutions (and suitable combinations thereof) will become clear to the skilled person based on the disclosure herein. In addition, or alternatively, other potentially useful humanizing substitutions can be ascertained by comparing the sequence of the framework regions of a naturally occurring V_{HH} sequence with the corresponding framework sequence of one or more closely related human V_{HH} sequences, after which one or more of the potentially useful humanizing substitutions (or combinations thereof) thus determined can be introduced into said V_{HH} sequence (in any manner known per se, as further described herein) and the resulting humanized V_{HH} sequences can be tested for affinity for the target, for stability, for ease and level of expression, and/or for other desired properties. In this way, by means of a limited degree of trial and error, other suitable humanizing substitutions (or suitable combinations thereof) can be determined by the skilled person based on the disclosure herein. Also, based on the foregoing, (the framework regions of) a Nanobody may be partially humanized or fully humanized.

[0425] Some particularly preferred humanized Nanobodies of the invention are humanized variants of the Nanobodies of SEQ ID NO's: 1890 to 2141, 2485 to 2490 and/or 2502 to 2529, which may for example, be humanized variants of Nanobodies that are directed against p19 (for example, humanized variants of Nanobodies that are p19+ sequences or p19− sequences, for example a humanized variant of one of the Nanobodies shown in FIGS. 20 and 21, respectively), against p40 (for example humanized variants of Nanobodies that are p40− sequences or p40+ sequences, for example a humanized variant of one of the Nanobodies shown in FIGS. 22 and 23, respectively), against p35 (for example a humanized variant of one of the Nanobodies shown in FIG. 24), against 11-27 (for example of one of the Nanobodies shown in FIG. 26), against IL-12Rb1 (for example a humanized variant of one of the Nanobodies shown in FIG. 27), against IL-12Rb2 (for example a humanized variant of one of the Nanobodies shown in FIG. 28), or against IL-23R (for example a humanized variant of one of the Nanobodies shown in FIG. 29). Examples of such humanized Nanobodies are given in SEQ ID NO's: 2559 to 2614 (see also FIG. 31), and the skilled person will be able to find other suitable humanized variants based on the disclosure herein, optionally after some limited trial-and-error.

[0426] Thus, some other preferred Nanobodies of the invention are Nanobodies which can bind (as further defined herein) to heterodimeric cytokines and/or their receptors and which:
[0427] i) are a humanized variant of one of the amino acid sequences of SEQ ID NO's: 1890 to 2141, 2485 to 2490 and/or 2502 to 2529; and/or
[0428] ii) have at least 80% amino acid identity with at least one of the amino acid sequences of SEQ ID NO's: 1890 to 2141, 2485 to 2490 and/or 2502 to 2529, in which for the purposes of determining the degree of amino acid identity, the amino acid residues that form the CDR sequences are disregarded;

[0429] and in which:
[0430] i) preferably one or more of the amino acid residues at positions 11, 37, 44, 45, 47, 83, 84, 103, 104 and 108 according to the Kabat numbering are chosen from the Hallmark residues mentioned in Table A-4 below.

[0431] Another aspect of the invention relates to nanobodies that are directed against p19 from mouse. Some non-limiting examples of such nanobodies are given in SEQ ID NO's: 2491-2501.

[0432] According to another specific aspect of the invention, the invention provides a number of stretches of amino acid residues (i.e. small peptides) that are particularly suited for binding to heterodimeric cytokines and/or their receptors (i.e. to p19, p40, p35, IL-12, IL-23, IL-27, IL-12Rb1, IL-12Rb2, IL-23R, the cognate receptor for IL-12 or the cognate receptor for IL-23, respectively, as further described herein). These stretches of amino acid residues may be present in, and/or may be corporated into, an amino acid sequence of the invention, in particular in such a way that they form (part of) the antigen binding site of an amino acid sequence of the invention. As these stretches of amino acid residues were first generated as CDR sequences of heavy chain antibodies or V_{HH} sequences that were raised against heterodimeric cytokines and/or their receptors (or may be based on and/or derived from such CDR sequences, as further described herein), they will also generally be referred to herein as “CDR sequences” (i.e. as CDR1 sequences, CDR2 sequences and CDR3 sequences, respectively). It should however be noted that the invention in its broadest sense is not limited to a specific structural role or function that these stretches of amino acid residues may have in an amino acid sequence of the invention, as long as these stretches of amino acid residues allow the amino acid sequence of the invention to bind to heterodimeric cytokines and/or their receptors. Thus, generally, the invention in its broadest sense comprises any amino acid sequence that is capable of binding to heterodimeric cytokines and/or their receptors and that comprises one or more CDR sequences as described herein, and in particular a suitable combination of two or more such CDR sequences, that are suitably linked to each other via one or more further amino acid sequences, such that the entire amino acid sequence forms a binding domain and/or binding unit that is capable of binding to heterodimeric cytokines and/or their receptors. It should however also be noted that the presence of only one such CDR sequence in an amino acid sequence of the invention may by itself already be sufficient to provide an amino acid sequence of the invention that is capable of binding to heterodimeric cytokines and/or their receptors; reference is for example again made to the so-called “Expedite fragments” described in WO 03/050531.

[0433] Thus, in another specific, but non-limiting aspect, the amino acid sequence of the invention may be an amino acid sequence that comprises at least one amino acid sequence that is chosen from the group consisting of the CDR1 sequences, CDR2 sequences and CDR3 sequences that are described herein from or any suitable combination thereof. Particularly suitable combinations will become clear to the skilled person based on the disclosure herein. In particular, an amino acid sequence of the invention may be an amino acid sequence that comprises at least one antigen binding site, wherein said antigen binding site comprises at least one amino acid sequence that is chosen from the group consisting of the CDR1 sequences, CDR2 sequences and CDR3 sequences that are described herein or any suitable combination thereof, such as the combinations that are described herein.

[0434] Generally, in this aspect of the invention, the amino acid sequence of the invention may be any amino acid sequence that comprises at least one stretch of amino acid residues, in which said stretch of amino acid residues has an amino acid sequence that corresponds to the sequence of at least one of the CDR sequences described herein. Such an amino acid sequence may or may not comprise an immunoglobulin fold. For example, and without limitation, such an amino acid sequence may be a suitable fragment of an immunoglobulin sequence that comprises at least one such CDR sequence, but that is not large enough to form a (complete) immunoglobulin fold (reference is for example again made to the “Expedite fragments” described in WO 03/050531). Alternatively, such an amino acid sequence may be a suitable “protein scaffold” that comprises least one stretch of amino acid residues that corresponds to such a CDR sequence (i.e. as part of its antigen binding site). Suitable scaffolds for presenting amino acid sequences will be clear to the skilled person, and for example comprise, without limitation, to binding scaffolds based on or derived from immunoglobulins (i.e. other than the immunoglobulin sequences already described herein), protein scaffolds derived from protein A domains (such as Affibodies™), tendamistat, fibronectin, lipocalin, CTLA-4, T-cell receptors, designed ankyrin repeats, avimers and PDZ domains (Binz et al., Nat. Biotech 2005, Vol 23:1257), and binding moieties based on DNA or RNA including but not limited to DNA or RNA aptamers (Ulrich et al., Comb Chem High Throughput Screen 2006 9(8):619-32).

[0435] Again, any amino acid sequence of the invention that comprises one or more of these CDR sequences is preferably such that it can specifically bind (as defined herein) to heterodimeric cytokines and/or their receptors, and more in particular such that it can bind to heterodimeric cytokines and/or their receptors with an affinity (suitably measured and/or expressed as a K_{D}-value (actual or apparent), a K_{A}-value (actual or apparent), a kₒₙ-rate and/or a k_{off}-rate, or alternatively as an IC₅₀ value, as further described herein), that is as defined herein.

[0436] In particular, the amino acid sequences of the invention may be amino acid sequences that are directed against p19 (which may be “p19+ sequences” or “p19− sequences”, both as defined herein); amino acid sequences that are directed against p40 (which may be “p40+ sequences” or “p40− sequences”, both as defined herein); amino acid sequences that are directed against p35; amino acid sequences that are directed against IL-23 (which may be amino acid sequences that are directed against p19 or against p40); amino acid sequences that are directed against IL-12 (which may be amino acid sequences that are directed against p35 or against p40); amino acid sequences that are directed against IL-23 (which may be amino acid sequences that are directed against p19 or against p40); amino acid sequences that are directed against IL-27; amino acid sequences that are directed against IL-12Rb1; amino acid sequences that are directed against IL-12Rb2; amino acid sequences that are directed against IL-23R; amino acid sequences that are directed against the cognate receptor of IL-12 (which may be amino acid sequences that are directed against IL-12Rb1 or IL-12Rb2); and/or amino acid sequences that are directed against the cognate receptor of IL-23 (which may be amino acid sequences that are directed against IL-12Rb1 or IL-23R). These amino acid sequences may be as further described herein and form further aspects of the invention (as do nucleotide sequences/nucleic acids encoding the same, polypeptides comprising the same and the use of these amino acid sequences in such constructs, methods for preparing the same and uses of the same, all as further described herein).

[0437] A) “p19+ Sequences”.

[0438] One specific, but non-limiting aspect relates to “p19+ sequences”, which generally are defined herein as amino acid sequences of the invention that are directed against (as defined herein) the p19 subunit (as present in for example IL-23), and that are capable of modulating, neutralizing, blocking and/or inhibiting the binding of a heterodimeric cytokine comprising a p19 subunit to its receptor, and in particular capable of are capable of modulating, neutralizing, blocking and/or inhibiting the binding of IL-23 to IL-23R (for example in the alpha-screen assay of Example 19 or 22).

[0439] P19+ sequences may generally be as further described herein (for example, in terms of affinity, specificity etc. for p19) for amino acid sequences of the invention in general. Also, as described herein for the amino acid sequences of the invention, the p19+ sequences are preferably such that they form or are capable of forming (optionally after suitable folding) a single antigen binding domain or antigen binding unit, and may for example be amino acid sequences that comprise an immunoglobulin fold, amino acid sequences that are comprised of four framework regions and three CDR's, and may in particular be domain antibodies, single domain antibodies, VHH's, “dAb's” or Nanobodies (all as further described herein), or suitable fragments thereof.

[0440] In one particular aspect, a p19+ sequence may comprise one or more stretches of amino acid residues chosen from the group consisting of:
[0441] a) the amino acid sequences from the “CDR1 Sequences Group 2” (as defined and listed in Table A-1; see also FIG. 11);
[0442] b) amino acid sequences that have at least 80% amino acid identity with at least one of the amino acid sequences from the “CDR1 Sequences Group 2”;
[0443] c) amino acid sequences that have 3, 2, or 1 amino acid difference with at least one of the amino acid sequences from the “CDR1 Sequences Group 2”;
[0444] d) the amino acid sequences from the “CDR2 Sequences Group 4” (as defined and listed in Table A-1; see also FIG. 11);
[0445] e) amino acid sequences that have at least 80% amino acid identity with at least one of the amino acid sequences from the “CDR2 Sequences Group 4”;
[0446] f) amino acid sequences that have 3, 2, or 1 amino acid difference with at least one of the amino acid sequences from the “CDR2 Sequences Group 4”;
[0447] g) the amino acid sequences from the “CDR3 Sequences Group 6” (as defined and listed in Table A-1; see also FIG. 11);
[0448] h) amino acid sequences that have at least 80% amino acid identity with at least one of the amino acid sequences from the “CDR3 Sequences Group 6”;
[0449] i) amino acid sequences that have 3, 2, or 1 amino acid difference with at least one of the amino acid sequences from the “CDR3 Sequences Group 6”;

[0450] or any suitable combination thereof.

[0451] Optionally, when an amino acid sequence of the invention contains one or more amino acid sequences according to b) and/or c), Optional Condition I, Optional Condition II and/or Optional Condition III (all as defined herein) may apply to said amino acid sequence (i.e. compared to the original amino acid sequence according to a)). Also, optionally, when an amino acid sequence of the invention contains one or more amino acid sequences according to e) and/or f), Optional Condition I, Optional Condition II and/or Optional Condition III (all as defined herein) may apply to said amino acid sequence (i.e. compared to the original amino acid sequence according to d)). Also, optionally, when an amino acid sequence of the invention contains one or more amino acid sequences according to h) and/or i), Optional Condition I, Optional Condition II and/or Optional Condition III (all as defined herein) may apply to said amino acid sequence (i.e. compared to the original amino acid sequence according to g)).

[0452] In this specific aspect, the amino acid sequence preferably comprises one or more stretches of amino acid residues chosen from the group consisting of:
[0453] a) the amino acid sequences from the “CDR1 Sequences Group 2”;
[0454] b) the amino acid sequences from the “CDR2 Sequences Group 4”; and
[0455] c) the amino acid sequences from the “CDR3 Sequences Group 6”;

[0456] or any suitable combination thereof.

[0457] Also, preferably, in such an amino acid sequence, at least one of said stretches of amino acid residues forms part of the antigen binding site for binding against p19.

[0458] In a more specific, but again non-limiting aspect, a p19+ sequence may comprise two or more stretches of amino acid residues chosen from the group consisting of:
[0459] a) the amino acid sequences from the “CDR1 Sequences Group 2”;
[0460] b) amino acid sequences that have at least 80% amino acid identity with at least one of the amino acid sequences from the “CDR1 Sequences Group 2”;
[0461] c) amino acid sequences that have 3, 2, or 1 amino acid difference with at least one of the amino acid sequences from the “CDR1 Sequences Group 2”;
[0462] d) the amino acid sequences from the “CDR2 Sequences Group 4”;
[0463] e) amino acid sequences that have at least 80% amino acid identity with at least one of the amino acid sequences from the “CDR2 Sequences Group 4”;
[0464] f) amino acid sequences that have 3, 2, or 1 amino acid difference with at least one of the amino acid sequences from the “CDR2 Sequences Group 4”;
[0465] g) the amino acid sequences from the “CDR3 Sequences Group 6”;
[0466] h) amino acid sequences that have at least 80% amino acid identity with at least one of the amino acid sequences from the “CDR3 Sequences Group 6”;
[0467] i) amino acid sequences that have 3, 2, or 1 amino acid difference with at least one of the amino acid sequences from the “CDR3 Sequences Group 6”;

[0468] such that (i) when the first stretch of amino acid residues corresponds to one of the amino acid sequences according to a), b) or c), the second stretch of amino acid residues corresponds to one of the amino acid sequences according to d), e), f), g), h) or i); (ii) when the first stretch of amino acid residues corresponds to one of the amino acid sequences according to d), e) or f), the second stretch of amino acid residues corresponds to one of the amino acid sequences according to a), b), c), g), h) or i); or (iii) when the first stretch of amino acid residues corresponds to one of the amino acid sequences according to g), h) or i), the second stretch of amino acid residues corresponds to one of the amino acid sequences according to a), b), c), d), e) or f).

[0469] In this specific aspect, the amino acid sequence preferably comprises two or more stretches of amino acid residues chosen from the group consisting of:
[0470] a) the amino acid sequences from the “CDR1 Sequences Group 2”;
[0471] b) the amino acid sequences from the “CDR2 Sequences Group 4”; and
[0472] c) the amino acid sequences from the “CDR3 Sequences Group 6”;

[0473] such that, (i) when the first stretch of amino acid residues corresponds to one of the amino acid sequences from the “CDR1 Sequences Group 2”, the second stretch of amino acid residues corresponds to one of the amino acid sequences from the “CDR2 Sequences Group 4” or from the “CDR3 Sequences Group 6”; (ii) when the first stretch of amino acid residues corresponds to one of the amino acid sequences from the “CDR2 Sequences Group 4”, the second stretch of amino acid residues corresponds to one of the amino acid sequences from the “CDR1 Sequences Group 2” or from the “CDR3 Sequences Group 6”; or (iii) when the first stretch of amino acid residues corresponds to one of the amino acid sequences from the “CDR3 Sequences Group 6”, the second stretch of amino acid residues corresponds to one of the amino acid sequences from the “CDR1 Sequences Group 2” or from the “CDR2 Sequences Group 4”.

[0474] Also, in such an amino acid sequence, the at least two stretches of amino acid residues again preferably form part of the antigen binding site for binding against p19.

[0475] In an even more specific, but non-limiting aspect, a p19+ sequence may comprise three or more stretches of amino acid residues, in which the first stretch of amino acid residues is chosen from the group consisting of:
[0476] a) the amino acid sequences from the “CDR1 Sequences Group 2”;
[0477] b) amino acid sequences that have at least 80% amino acid identity with at least one of the amino acid sequences from the “CDR1 Sequences Group 2”;
[0478] c) amino acid sequences that have 3, 2, or 1 amino acid difference with at least one of the amino acid sequences from the “CDR1 Sequences Group 2”;

[0479] the second stretch of amino acid residues is chosen from the group consisting of:
[0480] d) the amino acid sequences from the “CDR2 Sequences Group 4”;
[0481] e) amino acid sequences that have at least 80% amino acid identity with at least one of the amino acid sequences from the “CDR2 Sequences Group 4”;
[0482] f) amino acid sequences that have 3, 2, or 1 amino acid difference with at least one of the amino acid sequences from the “CDR2 Sequences Group 4”;

[0483] and the third stretch of amino acid residues is chosen from the group consisting of:
[0484] g) the amino acid sequences from the “CDR3 Sequences Group 6”;
[0485] h) amino acid sequences that have at least 80% amino acid identity with at least one of the amino acid sequences from the “CDR3 Sequences Group 6”;
[0486] i) amino acid sequences that have 3, 2, or 1 amino acid difference with at least one of the amino acid sequences from the “CDR3 Sequences Group 6”.

[0487] Preferably, in this specific aspect, the first stretch of amino acid residues is chosen from the group consisting of the amino acid sequences from the “CDR1 Sequences Group 2”; the second stretch of amino acid residues is chosen from the group consisting of the amino acid sequences from the “CDR2 Sequences Group 4”; and the third stretch of amino acid residues is chosen from the group consisting of the amino acid sequences from the “CDR3 Sequences Group 6”.

[0488] Again, preferably, in such an amino acid sequence, the at least three stretches of amino acid residues forms part of the antigen binding site for binding against p19.

[0489] Preferred combinations of such stretches of amino acid sequences will become clear from the further disclosure herein.

[0490] Preferably, in such amino acid sequences the CDR sequences have at least 70% amino acid identity, preferably at least 80% amino acid identity, more preferably at least 90% amino acid identity, such as 95% amino acid identity or more or even essentially 100% amino acid identity with the CDR sequences of at least one of the p19+ sequences listed in Table A-2 and FIG. 20. This degree of amino acid identity can for example be determined by determining the degree of amino acid identity (in a manner described herein) between said amino acid sequence and one or more of the sequences of SEQ ID NO's: 1890; 1891; 1892; 1893; 1894; 1895; 1896; 1897; 1898; 1899; 1900; 2485; 2486; 2487; 2488; 2489 and/or 2490 (see Table A-2 and FIG. 20), in which the amino acid residues that form the framework regions are disregarded. Also, such amino acid sequences of the invention can be as further described herein.

[0491] Also, such amino acid sequences are preferably such that they can specifically bind (as defined herein) to the p19 subunit; and more in particular bind to the p19 subunit with an affinity (suitably measured and/or expressed as a K_{D}-value (actual or apparent), a K_{A}-value (actual or apparent), a kₒₙ-rate and/or a k_{off}-rate, or alternatively as an IC₅₀ value (all as further) described herein) that is as defined herein.

[0492] When the amino acid sequence of the invention essentially consists of 4 framework regions (FR1 to FR4, respectively) and 3 complementarity determining regions (CDR1 to CDR3, respectively), the amino acid sequence of the invention is preferably such that:

[0493] CDR1 is chosen from the group consisting of:
[0494] a) the amino acid sequences from the “CDR1 Sequences Group 2”;
[0495] b) amino acid sequences that have at least 80% amino acid identity with at least one of the amino acid sequences from the “CDR1 Sequences Group 2”;
[0496] c) amino acid sequences that have 3, 2, or 1 amino acid difference with at least one of the amino acid sequences from the “CDR1 Sequences Group 2”;

[0497] and/or

[0498] CDR2 is chosen from the group consisting of:
[0499] d) the amino acid sequences from the “CDR2 Sequences Group 4”;
[0500] e) amino acid sequences that have at least 80% amino acid identity with at least one of the amino acid sequences from the “CDR2 Sequences Group 4”;
[0501] f) amino acid sequences that have 3, 2, or 1 amino acid difference with at least one of the amino acid sequences from the “CDR2 Sequences Group 4”;

[0502] and/or

[0503] CDR3 is chosen from the group consisting of:
[0504] g) the amino acid sequences from the “CDR3 Sequences Group 6”;
[0505] h) amino acid sequences that have at least 80% amino acid identity with at least one of the amino acid sequences from the “CDR3 Sequences Group 6”;
[0506] i) amino acid sequences that have 3, 2, or 1 amino acid difference with at least one of the amino acid sequences from the “CDR3 Sequences Group 6”.

[0507] In particular, such an amino acid sequence of the invention may he such that CDR1 is chosen from the group consisting of the amino acid sequences from the “CDR1 Sequences Group 2”; and/or CDR2 is chosen from the group consisting of the amino acid sequences from the “CDR2 Sequences Group 4”; and/or CDR3 is chosen from the group consisting of the amino acid sequences from the “CDR3 Sequences Group 6”.

[0508] In particular, when the amino acid sequence of the invention essentially consists of 4 framework regions (FR1 to FR4, respectively) and 3 complementarity determining regions (CDR1 to CDR3, respectively), the amino acid sequence of the invention is preferably such that:

[0509] CDR1 is chosen from the group consisting of:
[0510] a) the amino acid sequences from the “CDR1 Sequences Group 2”;
[0511] b) amino acid sequences that have at least 80% amino acid identity with at least one of the amino acid sequences from the “CDR1 Sequences Group 2”;
[0512] c) amino acid sequences that have 3, 2, or 1 amino acid difference with at least one of the amino acid sequences from the “CDR1 Sequences Group 2”;

[0513] and

[0514] CDR2 is chosen from the group consisting of:
[0515] d) the amino acid sequences from the “CDR2 Sequences Group 4”;
[0516] e) amino acid sequences that have at least 80% amino acid identity with at least one of the amino acid sequences from the “CDR2 Sequences Group 4”;
[0517] f) amino acid sequences that have 3, 2, or 1 amino acid difference with at least one of the amino acid sequences from the “CDR2 Sequences Group 4”;

[0518] and

[0519] CDR3 is chosen from the group consisting of:
[0520] g) the amino acid sequences from the “CDR3 Sequences Group 6”;
[0521] h) amino acid sequences that have at least 80% amino acid identity with at least one of the amino acid sequences from the “CDR3 Sequences Group 6”;
[0522] i) amino acid sequences that have 3, 2, or 1 amino acid difference with at least one of the amino acid sequences from the “CDR3 Sequences Group 6”; or any suitable fragment of such an amino acid sequence

[0523] In particular, such an amino acid sequence of the invention may be such that CDR1 is chosen from the group consisting of the amino acid sequences from the “CDR1 Sequences Group 2”; and CDR2 is chosen from the group consisting of the amino acid sequences from the “CDR2 Sequences Group 4”; and CDR3 is chosen from the group consisting of the amino acid sequences from the “CDR3 Sequences Group 6”.

[0524] Again, preferred combinations of CDR sequences will become clear from the further description herein.

[0525] Also, such amino acid sequences are preferably such that they can specifically bind (as defined herein) to the p19 subunit; and more in particular bind to the p19 subunit with an affinity (suitably measured and/or expressed as a K_{D}-value (actual or apparent), a K_{A}-value (actual or apparent), a kₒₙ-rate and/or a k_{off}-rate, or alternatively as an IC₅₀ value (all as further) described herein) that is as defined herein.

[0526] In one preferred, but non-limiting aspect, the invention relates to an amino acid sequence that essentially consists of 4 framework regions (FR1 to FR4, respectively) and 3 complementarity determining regions (CDR1 to CDR3, respectively), in which the CDR sequences of said amino acid sequence have at least 70% amino acid identity, preferably at least 80% amino acid identity, more preferably at least 90% amino acid identity, such as 95% amino acid identity or more or even essentially 100% amino acid identity with the CDR sequences of at least one of the amino acid sequences of SEQ ID NO's: 1890; 1891; 1892; 1893; 1894; 1895; 1896; 1897; 1898; 1899; 1900; 2485; 2486; 2487; 2488; 2489 and/or 2490 (see Table A-2 and FIG. 20). This degree of amino acid identity can for example be determined by determining the degree of amino acid identity (in a manner described herein) between said amino acid sequence and one or more of the sequences of SEQ ID NO's: 1890; 1891; 1892; 1893; 1894; 1895; 1896; 1897; 1898; 1899; 1900; 2485; 2486; 2487; 2488; 2489 and/or 2490 (see Table A-2 and FIG. 20), in which the amino acid residues that form the framework regions are disregarded. Such amino acid sequences of the invention can be as further described herein.

[0527] Some preferred, but non-limiting examples of p19+ sequences are the amino acid sequences of SEQ ID NO's: 1890; 1891; 1892; 1893; 1894; 1895; 1896; 1897; 1898; 1899; 1900; 2485; 2486; 2487; 2488; 2489 and/or 2490 (see Table A-2 and FIG. 20). Thus, according to another preferred, but non-limiting aspect of the invention, a p19+ sequence is an amino acid sequence that is directed against (as defined herein) the p19 subunit (as present in for example IL-23) and that are capable of modulating, neutralizing, blocking and/or inhibiting the binding of a heterodimeric cytokine comprising a p19 subunit to its receptor, and in particular capable of are capable of modulating, neutralizing, blocking and/or inhibiting the binding of IL-23 to IL-23R (for example in the alpha-screen assay of Example 19 or 22), and that either
[0528] a) has at least 70% amino acid identity, preferably at least 80% amino acid identity, more preferably at least 90% amino acid identity, such as 95% amino acid identity or more or even essentially 100% amino acid identity with at least one of the amino acid sequences of SEQ ID NO's: 1890; 1891; 1892; 1893; 1894; 1895; 1896; 1897; 1898; 1899; 1900; 2485; 2486; 2487; 2488; 2489 and/or 2490 (see Table A-2 and FIG. 20);

[0529] and/or that
[0530] b) has no more than 20, preferably no more than 10, such as 9, 8, 7, 6, 5, 4, 3, 2 or only one amino acid difference with at least one of the amino acid sequences of SEQ ID NO's: 1890; 1891; 1892; 1893; 1894; 1895; 1896; 1897; 1898; 1899; 1900; 2485; 2486; 2487; 2488; 2489 and/or 2490 (see Table A-2 and FIG. 20). Preferably, such an amino acid sequence has no more than a total of 5 (such as 4, 3, 2 or only one) such amino acid differences in the CDR's and/or no more than a total of 5 (such as 4, 3, 2 or only 1) such amino acid differences in the framework sequences;

[0531] and/or that
[0532] c) is either (i) capable of cross-blocking (as defined herein) the interaction of at least one of the amino acid sequences of SEQ ID NO's: 1890; 1891; 1892; 1893; 1894; 1895; 1896; 1897; 1898; 1899; 1900; 2485; 2486; 2487; 2488; 2489 and/or 2490 with the p19 subunit and/or (ii) being able to compete with (i.e. is a competitor for) the binding of at least one of the amino acid sequences of SEQ ID NO's: 1890; 1891; 1892; 1893; 1894; 1895; 1896; 1897; 1898; 1899; 1900; 2485; 2486; 2487; 2488; 2489 and/or 2490 (see Table A-2 and FIG. 20) to the p19 subunit.

[0533] In another preferred, but non-limiting aspect, a p19+ sequence is chosen from one of the amino acid sequences of SEQ ID NO's: 1890; 1891; 1892; 1893; 1894; 1895; 1896; 1897; 1898; 1899; 1900; 2485; 2486; 2487; 2488; 2489 and/or 2490 (see Table A-2 and FIG. 20).

[0534] B) “p19− Sequences”.

[0535] One specific, but non-limiting aspect relates to “p19− sequences”, which generally are defined herein as amino acid sequences of the invention that are directed against (as defined herein) the p19 subunit (as present in for example IL-23), but that (essentially) are not capable of neutralizing or inhibiting the binding of a heterodimeric cytokine comprising a p19 subunit to its receptor (for example, in a suitable alpha-screen assay as exemplified in Examples 19 and 22 for IL-23 and its cognate receptor and for IL-12 and its cognate receptor).

[0536] P19− sequences may generally be as further described herein (for example, in terms of affinity, specificity etc. for p19) for amino acid sequences of the invention in general. Also, as described herein for the amino acid sequences of the invention, the p19− sequences are preferably such that they form or are capable of forming (optionally after suitable folding) a single antigen binding domain or antigen binding unit, and may for example be amino acid sequences that comprise an immunoglobulin fold, amino acid sequences that are comprised of four framework regions and three CDR's, and may in particular be domain antibodies, single domain antibodies, VHH's, “dAb's” or Nanobodies (all as further described herein), or suitable fragments thereof.

[0537] In one particular aspect, a p19− sequence may comprise one or more stretches of amino acid residues chosen from the group consisting of:
[0538] a) the amino acid sequences from the “CDR1 Sequences Group 9” (as defined and listed in Table A-I; see also FIG. 12);
[0539] b) amino acid sequences that have at least 80% amino acid identity with at least one of the amino acid sequences from the “CDR1 Sequences Group 9”;
[0540] c) amino acid sequences that have 3, 2, or 1 amino acid difference with at least one of the amino acid sequences from the “CDR1 Sequences Group 9”;
[0541] d) the amino acid sequences from the “CDR2 Sequences Group 11” (as defined and listed in Table A-1; see also FIG. 12);
[0542] e) amino acid sequences that have at least 80% amino acid identity with at least one of the amino acid sequences from the “CDR2 Sequences Group 11”;
[0543] f) amino acid sequences that have 3, 2, or 1 amino acid difference with at least one of the amino acid sequences from the “CDR2 Sequences Group 11”;
[0544] g) the amino acid sequences from the “CDR3 Sequences Group 13” (as defined and listed in Table A-1; see also FIG. 12);
[0545] h) amino acid sequences that have at least 80% amino acid identity with at least one of the amino acid sequences from the “CDR3 Sequences Group 13”;
[0546] i) amino acid sequences that have 3, 2, or 1 amino acid difference with at least one of the amino acid sequences from the “CDR3 Sequences Group 13”;

[0547] or any suitable combination thereof.

[0548] Optionally, when an amino acid sequence of the invention contains one or more amino acid sequences according to b) and/or c), Optional Condition I, Optional Condition II and/or Optional Condition III (all as defined herein) may apply to said amino acid sequence (i.e. compared to the original amino acid sequence according to a)). Also, optionally, when an amino acid sequence of the invention contains one or more amino acid sequences according to e) and/or f), Optional Condition I, Optional Condition II and/or Optional Condition III (all as defined herein) may apply to said amino acid sequence (i.e. compared to the original amino acid sequence according to d)). Also, optionally, when an amino acid sequence of the invention contains one or more amino acid sequences according to h) and/or i), Optional Condition I, Optional Condition II and/or Optional Condition III (all as defined herein) may apply to said amino acid sequence (i.e. compared to the original amino acid sequence according to g)).

[0549] In this specific aspect, the amino acid sequence preferably comprises one or more stretches of amino acid residues chosen from the group consisting of:
[0550] a) the amino acid sequences from the “CDR1 Sequences Group 9”;
[0551] b) the amino acid sequences from the “CDR2 Sequences Group 11”; and
[0552] c) the amino acid sequences from the “CDR3 Sequences Group 13”;

[0553] or any suitable combination thereof.

[0554] Also, preferably, in such an amino acid sequence, at least one of said stretches of amino acid residues forms part of the antigen binding site for binding against p19.

[0555] In a more specific, but again non-limiting aspect, a p19− sequence may comprise two or more stretches of amino acid residues chosen from the group consisting of:
[0556] a) the amino acid sequences from the “CDR1 Sequences Group 9”;
[0557] b) amino acid sequences that have at least 80% amino acid identity with at least one of the amino acid sequences from the “CDR1 Sequences Group 9”;
[0558] c) amino acid sequences that have 3, 2, or 1 amino acid difference with at least one of the amino acid sequences from the “CDR1 Sequences Group 9”;
[0559] d) the amino acid sequences from the “CDR2 Sequences Group 11”;
[0560] e) amino acid sequences that have at least 80% amino acid identity with at least one of the amino acid sequences from the “CDR2 Sequences Group 11”;
[0561] f) amino acid sequences that have 3, 2, or 1 amino acid difference with at least one of the amino acid sequences from the “CDR2 Sequences Group 11”;
[0562] g) the amino acid sequences from the “CDR3 Sequences Group 13”;
[0563] h) amino acid sequences that have at least 80% amino acid identity with at least one of the amino acid sequences from the “CDR3 Sequences Group 13”;
[0564] i) amino acid sequences that have 3, 2, or 1 amino acid difference with at least one of the amino acid sequences from the “CDR3 Sequences Group 13”;

[0565] such that (i) when the first stretch of amino acid residues corresponds to one of the amino acid sequences according to a), b) or c), the second stretch of amino acid residues corresponds to one of the amino acid sequences according to d), e), f), g), h) or i); (ii) when the first stretch of amino acid residues corresponds to one of the amino acid sequences according to d), e) or f), the second stretch of amino acid residues corresponds to one of the amino acid sequences according to a), b), c), g), h) or i); or (iii) when the first stretch of amino acid residues corresponds to one of the amino acid sequences according to g), h) or i), the second stretch of amino acid residues corresponds to one of the amino acid sequences according to a), b), c), d), e) or f).

[0566] In this specific aspect, the amino acid sequence preferably comprises two or more stretches of amino acid residues chosen from the group consisting of:
[0567] a) the amino acid sequences from the “CDR1 Sequences Group 9”;
[0568] b) the amino acid sequences from the “CDR2 Sequences Group 11”; and
[0569] c) the amino acid sequences from the “CDR3 Sequences Group 13”;

[0570] such that, (i) when the first stretch of amino acid residues corresponds to one of the amino acid sequences from the “CDR1 Sequences Group 9”, the second stretch of amino acid residues corresponds to one of the amino acid sequences from the “CDR2 Sequences Group 11” or from the “CDR3 Sequences Group 13”; (ii) when the first stretch of amino acid residues corresponds to one of the amino acid sequences from the “CDR2 Sequences Group 11”, the second stretch of amino acid residues corresponds to one of the amino acid sequences from the “CDR1 Sequences Group 9” or from the “CDR3 Sequences Group 13”; or (iii) when the first stretch of amino acid residues corresponds to one of the amino acid sequences from the “CDR3 Sequences Group 13”, the second stretch of amino acid residues corresponds to one of the amino acid sequences from the “CDR1 Sequences Group 9” or from the “CDR2 Sequences Group 11”.

[0571] Also, in such an amino acid sequence, the at least two stretches of amino acid residues again preferably form part of the antigen binding site for binding against p19.

[0572] In an even more specific, but non-limiting aspect, a p19− sequence may comprise three or more stretches of amino acid residues, in which the first stretch of amino acid residues is chosen from the group consisting of:
[0573] a) the amino acid sequences from the “CDR1 Sequences Group 9”;
[0574] b) amino acid sequences that have at least 80% amino acid identity with at least one of the amino acid sequences from the “CDR1 Sequences Group 9”;
[0575] c) amino acid sequences that have 3, 2, or 1 amino acid difference with at least one of the amino acid sequences from the “CDR1 Sequences Group 9”;

[0576] the second stretch of amino acid residues is chosen from the group consisting of:
[0577] d) the amino acid sequences from the “CDR2 Sequences Group 11”;
[0578] e) amino acid sequences that have at least 80% amino acid identity with at least one of the amino acid sequences from the “CDR2 Sequences Group 11”;
[0579] f) amino acid sequences that have 3, 2, or 1 amino acid difference with at least one of the amino acid sequences from the “CDR2 Sequences Group 11”;

[0580] and the third stretch of amino acid residues is chosen from the group consisting of:
[0581] g) the amino acid sequences from the “CDR3 Sequences Group 13”;
[0582] h) amino acid sequences that have at least 80% amino acid identity with at least one of the amino acid sequences from the “CDR3 Sequences Group 13”;
[0583] i) amino acid sequences that have 3, 2, or 1 amino acid difference with at least one of the amino acid sequences from the “CDR3 Sequences Group 13”.

[0584] Preferably, in this specific aspect, the first stretch of amino acid residues is chosen from the group consisting of the amino acid sequences from the “CDR1 Sequences Group 9”; the second stretch of amino acid residues is chosen from the group consisting of the amino acid sequences from the “CDR2 Sequences Group 11”; and the third stretch of amino acid residues is chosen from the group consisting of the amino acid sequences from the “CDR3 Sequences Group 13”.

[0585] Again, preferably, in such an amino acid sequence, the at least three stretches of amino acid residues forms part of the antigen binding site for binding against p19.

[0586] Preferred combinations of such stretches of amino acid sequences will become clear from the further disclosure herein.

[0587] Preferably, in such amino acid sequences the CDR sequences have at least 70% amino acid identity, preferably at least 80% amino acid identity, more preferably at least 90% amino acid identity, such as 95% amino acid identity or more or even essentially 100% amino acid identity with the CDR sequences of at least one of the p19− sequences listed in Table A-2 and FIG. 21. This degree of amino acid identity can for example be determined by determining the degree of amino acid identity (in a manner described herein) between said amino acid sequence and one or more of the sequences of SEQ ID NO's: 1901; 1902; 1903; 1904; 1905; 1906; 1907; 1908; 1909; 1910; 1911; 1912; 1913; 1914; 1915; 1916; 1917; 1918; 1919; 1920; 1921; 1922; 1923; 1924; 1925; 1926; 1927; 1928; 1929; 1930; 1931; 1932; 1933; 1934; 1935; 1936; 1937; 1938; 1939; 2502 and/or 2503 (see Table A-2 and FIG. 21), in which the amino acid residues that form the framework regions are disregarded. Also, such amino acid sequences of the invention can be as further described herein.

[0588] Also, such amino acid sequences are preferably such that they can specifically bind (as defined herein) to the p19 subunit; and more in particular bind to the p19 subunit with an affinity (suitably measured and/or expressed as a K_{D}-value (actual or apparent), a K_{A}-value (actual or apparent), a kₒₙ-rate and/or a k_{off}-rate, or alternatively as an IC₅₀ value (all as further) described herein) that is as defined herein.

[0589] When the amino acid sequence of the invention essentially consists of 4 framework regions (FR1 to FR4, respectively) and 3 complementarity determining regions (CDR1 to CDR3, respectively), the amino acid sequence of the invention is preferably such that:

[0590] CDR1 is chosen from the group consisting of:
[0591] a) the amino acid sequences from the “CDR1 Sequences Group 9”;
[0592] b) amino acid sequences that have at least 80% amino acid identity with at least one of the amino acid sequences from the “CDR1 Sequences Group 9”;
[0593] c) amino acid sequences that have 3, 2, or 1 amino acid difference with at least one of the amino acid sequences from the “CDR1 Sequences Group 9”;

[0594] and/or

[0595] CDR2 is chosen from the group consisting of:
[0596] d) the amino acid sequences from the “CDR2 Sequences Group 11”;
[0597] e) amino acid sequences that have at least 80% amino acid identity with at least one of the amino acid sequences from the “CDR2 Sequences Group 11”;
[0598] f) amino acid sequences that have 3, 2, or 1 amino acid difference with at least one of the amino acid sequences from the “CDR2 Sequences Group 11”;

[0599] and/or

[0600] CDR3 is chosen from the group consisting of:
[0601] g) the amino acid sequences from the “CDR3 Sequences Group 13”;
[0602] h) amino acid sequences that have at least 80% amino acid identity with at least one of the amino acid,sequences from the “CDR3 Sequences Group 13”;
[0603] i) amino acid sequences that have 3, 2, or 1 amino acid difference with at least one of the amino acid sequences from the “CDR3 Sequences Group 13”.

[0604] In particular, such an amino acid sequence of the invention may be such that CDR1 is chosen from the group consisting of the amino acid sequences from the “CDR1 Sequences Group 9”; and/or CDR2 is chosen from the group consisting of the amino acid sequences from the “CDR2 Sequences Group 11”; and/or CDR3 is chosen from the group consisting of the amino acid sequences from the “CDR3 Sequences Group 13”.

[0605] In particular, when the amino acid sequence of the invention essentially consists of 4 framework regions (FR1 to FR4, respectively) and 3 complementarity determining regions (CDR1 to CDR3, respectively), the amino acid sequence of the invention is preferably such that:

[0606] CDR1 is chosen from the group consisting of:
[0607] a) the amino acid sequences from the “CDR1 Sequences Group 9”;
[0608] b) amino acid sequences that have at least 80% amino acid identity with at least one of the amino acid sequences from the “CDR1 Sequences Group 9”;
[0609] c) amino acid sequences that have 3, 2, or 1 amino acid difference with at least one of the amino acid sequences from the “CDR1 Sequences Group 9”;

[0610] and

[0611] CDR2 is chosen from the group consisting of:
[0612] d) the amino acid sequences from the “CDR2 Sequences Group 11”;
[0613] e) amino acid sequences that have at least 80% amino acid identity with at least one of the amino acid sequences from the “CDR2 Sequences Group 11”;
[0614] f) amino acid sequences that have 3, 2, or 1 amino acid difference with at least one of the amino acid sequences from the “CDR2 Sequences Group 11”;

[0615] and

[0616] CDR3 is chosen from the group consisting of:
[0617] g) the amino acid sequences from the “CDR3 Sequences Group 13”;
[0618] h) amino acid sequences that have at least 80% amino acid identity with at least one of the amino acid sequences from the “CDR3 Sequences Group 13”;
[0619] i) amino acid sequences that have 3, 2, or 1 amino acid difference with at least one of the amino acid sequences from the “CDR3 Sequences Group 13”; or any suitable fragment of such an amino acid sequence

[0620] In particular, such an amino acid sequence of the invention may be such that CDR1 is chosen from the group consisting of the amino acid sequences from the “CDR1 Sequences Group 9”; and CDR2 is chosen from the group consisting of the amino acid sequences from the “CDR2 Sequences Group 11”; and CDR3 is chosen from the group consisting of the amino acid sequences from the “CDR3 Sequences Group 13”.

[0621] Again, preferred combinations of CDR sequences will become clear from the further description herein.

[0622] Also, such amino acid sequences are preferably such that they can specifically bind (as defined herein) to the p19 subunit; and more in particular bind to the p 19 subunit with an affinity (suitably measured and/or expressed as a K_{D}-value (actual or apparent), a K_{A}-value (actual or apparent), a kₒₙ-rate and/or a k_{off}-rate, or alternatively as an IC₅₀ value (all as further) described herein) that is as defined herein.

[0623] In one preferred, but non-limiting aspect, the invention relates to an amino acid sequence that essentially consists of 4 framework regions (FR1 to FR4, respectively) and 3 complementarity determining regions (CDR1 to CDR3, respectively), in which the CDR sequences of said amino acid sequence have at least 70% amino acid identity, preferably at least 80% amino acid identity, more preferably at least 90% amino acid identity, such as 95% amino acid identity or more or even essentially 100% amino acid identity with the CDR sequences of at least one of the amino acid sequences of SEQ ID NO's: 1901; 1902; 1903; 1904; 1905; 1906; 1907; 1908; 1909; 1910; 1911; 1912; 1913; 1914; 1915; 1916; 1917; 1918; 1919; 1920; 1921; 1922; 1923; 1924; 1925; 1926; 1927; 1928; 1929; 1930; 1931; 1932; 1933; 1934; 1935; 1936; 1937; 1938; 1939; 2502 and/or 2503 (see Table A-2 and FIG. 21). This degree of amino acid identity can for example be determined by determining the degree of amino acid identity (in a manner described herein) between said amino acid sequence and one or more of the sequences of SEQ ID NO's: 1901; 1902; 1903; 1904; 1905; 1906; 1907; 1908; 1909; 1910; 1911; 1912; 1913; 1914; 1915; 1916; 1917; 1918; 1919; 1920; 1921; 1922; 1923; 1924; 1925; 1926; 1927; 1928; 1929; 1930; 1931; 1932; 1933; 1934; 1935; 1936; 1937; 1938; 1939; 2502 and/or 2503 (see Table A-2 and FIG. 21), in which the amino acid residues that form the framework regions are disregarded. Such amino acid sequences of the invention can be as further described herein.

[0624] Some preferred, but non-limiting examples of p19− sequence are the amino acid sequences of SEQ ID NO's: 1901; 1902; 1903; 1904; 1905; 1906; 1907; 1908; 1909; 1910; 1911; 1912; 1913; 1914; 1915; 1916; 1917; 1918; 1919; 1920; 1921; 1922; 1923; 1924; 1925; 1926; 1927; 1928; 1929; 1930; 1931; 1932; 1933; 1934; 1935; 1936; 1937; 1938; 1939; 2502 and/or 2503 (see Table A-2 and FIG. 21). Thus, according to another preferred, but non-limiting aspect of the invention, a p19− sequence is an amino acid sequence that is directed against (as defined herein) the p19 subunit (as present in for example IL-23) but that (essentially) are not capable of neutralizing or inhibiting the binding of a heterodimeric cytokine comprising a p19 subunit to its receptor (for example, in a suitable alpha-screen assay as exemplified in Examples 19 and 22 for IL-23 and its cognate receptor and for IL-12 and its cognate receptor), and that either:
[0625] a) has at least 70% amino acid identity, preferably at least 80% amino acid identity, more preferably at least 90% amino acid identity, such as 95% amino acid identity or more or even essentially 100% amino acid identity with at least one of the amino acid sequences of. SEQ ID NO's: 1901; 1902; 1903; 1904; 1905; 1906; 1907; 1908; 1909; 1910; 1911; 1912; 1913; 1914; 1915; 1916; 1917; 1918; 1919; 1920; 1921; 1922; 1923; 1924; 1925; 1926; 1927; 1928; 1929; 1930; 1931; 1932; 1933; 1934; 1935; 1936; 1937; 1938; 1939; 2502 and/or 2503 (see Table A-2 and FIG. 21);

[0626] and/or that
[0627] b) has no more than 20, preferably no more than 10, such as 9, 8, 7, 6, 5, 4, 3, 2 or only one amino acid difference with at least one of the amino acid sequences of SEQ ID NO's: 1901; 1902; 1903; 1904; 1905; 1906; 1907; 1908; 1909; 1910; 1911; 1912; 1913; 1914; 1915; 1916; 1917; 1918; 1919; 1920; 1921; 1922; 1923; 1924; 1925; 1926; 1927; 1928; 1929; 1930; 1931; 1932; 1933; 1934; 1935; 1936; 1937; 1938; 1939; 2502 and/or 2503 (see Table A-2 and FIG. 21). Preferably, such an amino acid sequence has no more than a total of 5 (such as 4, 3, 2 or only one) such amino acid differences in the CDR's and/or no more than a total of 5 (such as 4, 3, 2 or only 1) such amino acid differences in the framework sequences;

[0628] and/or that
[0629] c) is either (i) capable of cross-blocking (as defined herein) the interaction of at least one of the amino acid sequences of SEQ ID NO's: 1901; 1902; 1903; 1904; 1905; 1906; 1907; 1908; 1909; 1910; 1911; 1912; 1913; 1914; 1915; 1916; 1917; 1918; 1919; 1920; 1921; 1922; 1923; 1924; 1925; 1926; 1927; 1928; 1929; 1930; 1931; 1932; 1933; 1934; 1935; 1936; 1937; 1938; 1939; 2502 and/or 2503 (see Table A-2 and FIG. 20) with the p19 subunit and/or (ii) being able to compete with (i.e. is a competitor for) the binding of at least one of the amino acid sequences of SEQ ID NO's: 1901; 1902; 1903; 1904; 1905; 1906; 1907; 1908; 1909; 1910; 1911; 1912; 1913; 1914; 1915; 1916; 1917; 1918; 1919; 1920; 1921; 1922; 1923; 1924; 1925; 1926; 1927; 1928; 1929; 1930; 1931; 1932; 1933; 1934; 1935; 1936; 1937; 1938; 1939; 2502 and/or 2503 (see Table A-2 and FIG. 21) to the p19 subunit.

[0630] In another preferred, but non-limiting aspect, a p19 sequence is chosen from one of the amino acid sequences of SEQ ID NO's: 1901; 1902; 1903; 1904; 1905; 1906; 1907; 1908; 1909; 1910; 1911; 1912; 1913; 1914; 1915; 1916; 1917; 1918; 1919; 1920; 1921; 1922; 1923; 1924; 1925; 1926; 1927; 1928; 1929; 1930; 1931; 1932; 1933; 1934; 1935; 1936; 1937; 1938; 1939; 2502 and/or 2503 (see Table A-2 and FIG. 21).

[0631] C) P40− Sequences.

[0632] One specific, but non-limiting aspect relates to “p40− sequences”, which generally are defined herein as amino acid sequences of the invention that are directed against (as defined herein) the p40 subunit (as present in for example IL-23 and IL-12), but that (essentially) are not capable of neutralizing or inhibiting the binding of a heterodimeric cytokine comprising a p40 subunit to its receptor (for example, in a suitable alpha-screen assay as exemplified in Examples 19 and 22 for IL-23 and its cognate receptor and for IL-12 and its cognate receptor).

[0633] P40− sequences may generally be as further described herein (for example, in terms of affinity, specificity etc. for p40) for amino acid sequences of the invention in general. Also, as described herein for the amino acid sequences of the invention, the p40− sequences are preferably such that they form or are capable of forming (optionally after suitable folding) a single antigen binding domain or antigen binding unit, and may for example be amino acid sequences that comprise an immunoglobulin fold, amino acid sequences that are comprised of four framework regions and three CDR's, and may in particular be domain antibodies, single domain antibodies, VHH's, “dAb's” or Nanobodies (all as further described herein), or suitable fragments thereof.

[0634] In one particular aspect, a p40− sequence may comprise one or more stretches of amino acid residues chosen from the group consisting of:
[0635] a) the amino acid sequences from the “CDR1 Sequences Group 16” (as defined and listed in Table A-1; see also FIG. 13);
[0636] b) amino acid sequences that have at least 80% amino acid identity with at least one of the amino acid sequences from the “CDR1 Sequences Group 16”;
[0637] c) amino acid sequences that have 3, 2, or 1 amino acid difference with at least one of the amino acid sequences from the “CDR1 Sequences Group 16”;
[0638] d) the amino acid sequences from the “CDR2 Sequences Group 18” (as defined and listed in Table A-1; see also FIG. 13);
[0639] e) amino acid sequences that have at least 80% amino acid identity with at least one of the amino acid sequences from the “CDR2 Sequences Group 18”;
[0640] f) amino acid sequences that have 3, 2, or 1 amino acid difference with at least one of the amino acid sequences from the “CDR2 Sequences Group 18”;
[0641] g) the amino acid sequences from the “CDR3 Sequences Group 20” (as defined and listed in Table A-1; see also FIG. 13);
[0642] h) amino acid sequences that have at least 80% amino acid identity with at least one of the amino acid sequences from the “CDR3 Sequences Group 20”;
[0643] i) amino acid sequences that have 3, 2, or 1 amino acid difference with at least one of the amino acid sequences from the “CDR3 Sequences Group 20”;

[0644] or any suitable combination thereof.

[0645] Optionally, when an amino acid sequence of the invention contains one or more amino acid sequences according to b) and/or c), Optional Condition I, Optional Condition II and/or Optional Condition III (all as defined herein) may apply to said amino acid sequence (i.e. compared to the original amino acid sequence according to a)). Also, optionally, when an amino acid sequence of the invention contains one or more amino acid sequences according to e) and/or f), Optional Condition I, Optional Condition II and/or Optional Condition III (all as defined herein) may apply to said amino acid sequence (i.e. compared to the original amino acid sequence according to d)). Also, optionally, when an amino acid sequence of the invention contains one or more amino acid sequences according to h) and/or i), Optional Condition I, Optional Condition II and/or Optional Condition III (all as defined herein) may apply to said amino acid sequence (i.e. compared to the original amino acid sequence according to g)).

[0646] In this specific aspect, the amino acid sequence preferably comprises one or more stretches of amino acid residues chosen from the group consisting of:
[0647] a) the amino acid sequences from the “CDR1 Sequences Group 16”;
[0648] b) the amino acid sequences from the “CDR2 Sequences Group 18”; and
[0649] c) the amino acid sequences from the “CDR3 Sequences Group 20”;

[0650] or any suitable combination thereof.

[0651] Also, preferably, in such an amino acid sequence, at least one of said stretches of amino acid residues forms part of the antigen binding site for binding against p40.

[0652] In a more specific, but again non-limiting aspect, a p40− sequence may comprise two or more stretches of amino acid residues chosen from the group consisting of:
[0653] a) the amino acid sequences from the “CDR1 Sequences Group 16”;
[0654] b) amino acid sequences that have at least 80% amino acid identity with at least one of the amino acid sequences from the “CDR1 Sequences Group 16”;
[0655] c) amino acid sequences that have 3, 2, or 1 amino acid difference with at least one of the amino acid sequences from the “CDR1 Sequences Group 16”;
[0656] d) the amino acid sequences from the “CDR2 Sequences Group 18”;
[0657] e) amino acid sequences that have at least 80% amino acid identity with at least one of the amino acid sequences from the “CDR2 Sequences Group 18”;
[0658] f) amino acid sequences that have 3, 2, or 1 amino acid difference with at least one of the amino acid sequences from the “CDR2 Sequences Group 18”;
[0659] g) the amino acid sequences from the “CDR3 Sequences Group 20”;
[0660] h) amino acid sequences that have at least 80% amino acid identity with at least one of the amino acid sequences from the “CDR3 Sequences Group 20”;
[0661] i) amino acid sequences that have 3, 2, or 1 amino acid difference with at least one of the amino acid sequences from the “CDR3 Sequences Group 20”;

[0662] such that (i) when the first stretch of amino acid residues corresponds to one of the amino acid sequences according to a), b) or c), the second stretch of amino acid residues corresponds to one of the amino acid sequences according to d), e), f), g), h) or i); (ii) when the first stretch of amino acid residues corresponds to one of the amino acid sequences according to d), e) or f), the second stretch of amino acid residues corresponds to one of the amino acid sequences according to a), b), c), g), h) or i); or (iii) when the first stretch of amino acid residues corresponds to one of the amino acid sequences according to g), h) or i), the second stretch of amino acid residues corresponds to one of the amino acid sequences according to a), b), c), d), e) or f).

[0663] In this specific aspect, the amino acid sequence preferably comprises two or more stretches of amino acid residues chosen from the group consisting of:
[0664] a) the amino acid sequences from the “CDR1 Sequences Group 16”;
[0665] b) the amino acid sequences from the “CDR2 Sequences Group 18”; and
[0666] c) the amino acid sequences from the “CDR3 Sequences Group 20”;

[0667] such that, (i) when the first stretch of amino acid residues corresponds to one of the amino acid sequences from the “CDR1 Sequences Group 16”, the second stretch of amino acid residues corresponds to one of the amino acid sequences from the “CDR2 Sequences Group 18” or from the “CDR3 Sequences Group 20”; (ii) when the first stretch of amino acid residues corresponds to one of the amino acid sequences from the “CDR2 Sequences Group 18”, the second stretch of amino acid residues corresponds to one of the amino acid sequences from the “CDR1 Sequences Group 16” or from the “CDR3 Sequences Group 20”; or (iii) when the first stretch of amino acid residues corresponds to one of the amino acid sequences from the “CDR3 Sequences Group 20”, the second stretch of amino acid residues corresponds to one of the amino acid sequences from the “CDR1 Sequences Group 16” or from the “CDR2 Sequences Group 18”.

[0668] Also, in such an amino acid sequence, the at least two stretches of amino acid residues again preferably form part of the antigen binding site for binding against p40.

[0669] In an even more specific, but non-limiting aspect, a p40− sequence may comprise three or more stretches of amino acid residues, in which the first stretch of amino acid residues is chosen from the group consisting of:
[0670] a) the amino acid sequences from the “CDR1 Sequences Group 16”;
[0671] b) amino acid sequences that have at least 80% amino acid identity with at least one of the amino acid sequences from the “CDR1 Sequences Group 16”;
[0672] c) amino acid sequences that have 3, 2, or 1 amino acid difference with at least one of the amino acid sequences from the “CDR1 Sequences Group 16”;

[0673] the second stretch of amino acid residues is chosen from the group consisting of:
[0674] d) the amino acid sequences from the “CDR2 Sequences Group 18”;
[0675] e) amino acid sequences that have at least 80% amino acid identity with at least one of the amino acid sequences from the “CDR2 Sequences Group 18”;
[0676] f) amino acid sequences that have 3, 2, or 1 amino acid difference with at least one of the amino acid sequences from the “CDR2 Sequences Group 18”;

[0677] and the third stretch of amino acid residues is chosen from the group consisting of:
[0678] g) the amino acid sequences from the “CDR3 Sequences Group 20”;
[0679] h) amino acid sequences that have at least 80% amino acid identity with at least one of the amino acid sequences from the “CDR3 Sequences Group 20”;
[0680] i) amino acid sequences that have 3, 2, or 1 amino acid difference with at least one of the amino acid sequences from the “CDR3 Sequences Group 20”.

[0681] Preferably, in this specific aspect, the first stretch of amino acid residues is chosen from the group consisting of the amino acid sequences from the “CDR1 Sequences Group 16”; the second stretch of amino acid residues is chosen from the group consisting of the amino acid sequences from the “CDR2 Sequences Group 18”; and the third stretch of amino acid residues is chosen from the group consisting of the amino acid sequences from the “CDR3 Sequences Group 20”.

[0682] Again, preferably, in such an amino acid sequence, the at least three stretches of amino acid residues forms part of the antigen binding site for binding against p40.

[0683] Preferred combinations of such stretches of amino acid sequences will become clear from the further disclosure herein.

[0684] Preferably, in such amino acid sequences the CDR sequences have at least 70% amino acid identity, preferably at least 80% amino acid identity, more preferably at least 90% amino acid identity, such as 95% amino acid identity or more or even essentially 100% amino acid identity with the CDR sequences of at least one of the p40− sequences listed in Table A-2 and FIG. 22. This degree of amino acid identity can for example be determined by determining the degree of amino acid identity (in a manner described herein) between said amino acid sequence and one or more of the sequences of SEQ ID NO's: 1940; 1941; 1942; 1943; 1944; 1945; 1955; 1958; 1968; 1971; 1972; 1974; 1975; 1976; 1977; 1978; 1979; 1980; 1983; 1986; 1989; 1991; 1992; 1996; 2002; 2004; 2006; 2007; 2023; 2024; 2028; 2033; 2504; 2505; 2506; 2507; 2508 and/or 2509 (see Table A-2 and FIG. 22), in which the amino acid residues that form the framework regions are disregarded. Also, such amino acid sequences of the invention can be as further described herein.

[0685] Also, such amino acid sequences are preferably such that they can specifically bind (as defined herein) to the p40 subunit; and more in particular bind to the p40 subunit with an affinity (suitably measured and/or expressed as a K_{D}-value (actual or apparent), a K_{A}-value (actual or apparent), a kₒₙ-rate and/or a k_{off}-rate, or alternatively as an IC₅₀ value (all as further) described herein) that is as defined herein.

[0686] When the amino acid sequence of the invention essentially consists of 4 framework regions (FR1 to FR4, respectively) and 3 complementarity determining regions (CDR1 to CDR3, respectively), the amino acid sequence of the invention is preferably such that:

[0687] CDR1 is chosen from the group consisting of:
[0688] a) the amino acid sequences from the “CDR1 Sequences Group 16”;
[0689] b) amino acid sequences that have at least 80% amino acid identity with at least one of the amino acid sequences from the “CDR1 Sequences Group 16”;
[0690] c) amino acid sequences that have 3, 2, or 1 amino acid difference with at least one of the amino acid sequences from the “CDR1 Sequences Group 16”;

[0691] and/or

[0692] CDR2 is chosen from the group consisting of:
[0693] d) the amino acid sequences from the “CDR2 Sequences Group 18”;
[0694] e) amino acid sequences that have at least 80% amino acid identity with at least one of the amino acid sequences from the “CDR2 Sequences Group 18”;
[0695] f) amino acid sequences that have 3, 2, or 1 amino acid difference with at least one of the amino acid sequences from the “CDR2 Sequences Group 18”;

[0696] and/or

[0697] CDR3 is chosen from the group consisting of:
[0698] g) the amino acid sequences from the “CDR3 Sequences Group 20”;
[0699] h) amino acid sequences that have at least 80% amino acid identity with at least one of the amino acid sequences from the “CDR3 Sequences Group 20”;
[0700] i) amino acid sequences that have 3, 2, or 1 amino acid difference with at least one of the amino acid sequences from the “CDR3 Sequences Group 20”.

[0701] In particular, such an amino acid sequence of the invention may be such that CDR1 is chosen from the group consisting of the amino acid sequences from the “CDR1 Sequences Group 16”; and/or CDR2 is chosen from the group consisting of the amino acid sequences from the “CDR2 Sequences Group 18”; and/or CDR3 is chosen from the group consisting of the amino acid sequences from the “CDR3 Sequences Group 20”.

[0702] In particular, when the amino acid sequence of the invention essentially consists of 4 framework regions (FR1 to FR4, respectively) and 3 complementarity determining regions (CDR1 to CDR3, respectively), the amino acid sequence of the invention is preferably such that:

[0703] CDR1 is chosen from the group consisting of:
[0704] a) the amino acid sequences from the “CDR1 Sequences Group 16”;
[0705] b) amino acid sequences that have at least 80% amino acid identity with at least one of the amino acid sequences from the “CDR1 Sequences Group 16”;
[0706] c) amino acid sequences that have 3, 2, or 1 amino acid difference with at least one of the amino acid sequences from the “CDR1 Sequences Group 16”;

[0707] and

[0708] CDR2 is chosen from the group consisting of:
[0709] d) the amino acid sequences from the “CDR2 Sequences Group 18”;
[0710] e) amino acid sequences that have at least 80% amino acid identity with at least one of the amino acid sequences from the “CDR2 Sequences Group 18”;
[0711] f) amino acid sequences that have 3, 2, or 1 amino acid difference with at least one of the amino acid sequences from the “CDR2 Sequences Group 18”;

[0712] and

[0713] CDR3 is chosen from the group consisting of:
[0714] g) the amino acid sequences from the “CDR3 Sequences Group 20”;
[0715] h) amino acid sequences that have at least 80% amino acid identity with at least one of the amino acid sequences from the “CDR3 Sequences Group 20”;
[0716] i) amino acid sequences that have 3, 2, or 1 amino acid difference with at least one of the amino acid sequences from the “CDR3 Sequences Group 20”; or any suitable fragment of such an amino acid sequence

[0717] In particular, such an amino acid sequence of the invention may be such that CDR1 is chosen from the group consisting of the amino acid sequences from the “CDR1 Sequences Group 16”; and CDR2 is chosen from the group consisting of the amino acid sequences from the “CDR2 Sequences Group 18”; and CDR3 is chosen from the group consisting of the amino acid sequences from the “CDR3 Sequences Group 20”.

[0718] Again, preferred combinations of CDR sequences will become clear from the further description herein.

[0719] Also, such amino acid sequences are preferably such that they can specifically bind (as defined herein) to the p40 subunit; and more in particular bind to the p40 subunit with an affinity (suitably measured and/or expressed as a K_{D}-value (actual or apparent), a K_{A}-value (actual or apparent), a kₒₙ-rate and/or a k_{off}-rate, or alternatively as an IC₅₀ value (all as further) described herein) that is as defined herein.

[0720] In one preferred, but non-limiting aspect, the invention relates to an amino acid sequence that essentially consists of 4 framework regions (FR1 to FR4, respectively) and 3 complementarity determining regions (CDR1 to CDR3, respectively), in which the CDR sequences of said amino acid sequence have at least 70% amino acid identity, preferably at least 80% amino acid identity, more preferably at least 90% amino acid identity, such as 95% amino acid identity or more or even essentially 100% amino acid identity with the CDR sequences of at least one of the amino acid sequences of SEQ ID NO's: 1940; 1941; 1942; 1943; 1944; 1945; 1955; 1958; 1968; 1971; 1972; 1974; 1975; 1976; 1977; 1978; 1979; 1980; 1983; 1986; 1989; 1991; 1992; 1996; 2002; 2004; 2006; 2007; 2023; 2024; 2028; 2033; 2504; 2505; 2506; 2507; 2508 and/or 2509 (see Table A-2 and FIG. 22). This degree of amino acid identity can for example be determined by determining the degree of amino acid identity (in a manner described herein) between said amino acid sequence and one or more of the sequences of SEQ ID NO's: 1940; 1941; 1942; 1943; 1944; 1945; 1955; 1958; 1968; 1971; 1972; 1974; 1975; 1976; 1977; 1978; 1979; 1980; 1983; 1986; 1989; 1991; 1992; 1996; 2002; 2004; 2006; 2007; 2023; 2024; 2028; 2033; 2504; 2505; 2506; 2507; 2508 and/or 2509 (see Table A-2 and FIG. 22), in which the amino acid residues that form the framework regions are disregarded. Such amino acid sequences of the invention can be as further described herein.

[0721] Some preferred, but non-limiting examples of p40− sequence are the amino acid sequences of SEQ ID NO's: 1940; 1941; 1942; 1943; 1944; 1945; 1955; 1958; 1968; 1971; 1972; 1974; 1975; 1976; 1977; 1978; 1979; 1980; 1983; 1986; 1989; 1991; 1992; 1996; 2002; 2004; 2006; 2007; 2023; 2024; 2028; 2033; 2504; 2505; 2506; 2507; 2508 and/or 2509 (see Table A-2 and FIG. 22). Thus, according to another preferred, but non-limiting aspect of the invention, a p40− sequence is an amino acid sequence that is directed against (as defined herein) the p40 subunit (as present in for example IL-23 and IL-12) but that (essentially) are not capable of neutralizing or inhibiting the binding of a heterodimeric cytokine comprising a p40 subunit to its receptor (for example, in a suitable alpha-screen assay as exemplified in Examples 19 and 22 for IL-23 and its cognate receptor and for IL-12 and its cognate receptor), and that either:
[0722] a) has at least 70% amino acid identity, preferably at least 80% amino acid identity, more preferably at least 90% amino acid identity, such as 95% amino acid identity or more or even essentially 100% amino acid identity with at least one of the amino acid sequences of SEQ ID NO's: 1940; 1941; 1942; 1943; 1944; 1945; 1955; 1958; 1968; 1971; 1972; 1974; 1975; 1976; 1977; 1978; 1979; 1980; 1983; 1986; 1989; 1991; 1992; 1996; 2002; 2004; 2006; 2007; 2023; 2024; 2028; 2033; 2504; 2505; 2506; 2507; 2508 and/or 2509 (see Table A-2 and FIG. 22);

[0723] and/or that
[0724] b) has no more than 20, preferably no more than 10, such as 9, 8, 7, 6, 5, 4, 3, 2 or only one amino acid difference with at least one of the amino acid sequences of SEQ ID NO's: 1940; 1941; 1942; 1943; 1944; 1945; 1955; 1958; 1968; 1971; 1972; 1974; 1975; 1976; 1977; 1978; 1979; 1980; 1983; 1986; 1989; 1991; 1992; 1996; 2002; 2004; 2006; 2007; 2023; 2024; 2028; 2033; 2504; 2505; 2506; 2507; 2508 and/or 2509 (see Table A-2 and FIG. 22). Preferably, such an amino acid sequence has no more than a total of 5 (such as 4, 3, 2 or only one) such amino acid differences in the CDR's and/or no more than a total of 5 (such as 4, 3, 2 or only 1) such amino acid differences in the framework sequences;

[0725] and/or that
[0726] c) is either (i) capable of cross-blocking (as defined herein) the interaction of at least one of the amino acid sequences of SEQ ID NO's: 1940; 1941; 1942; 1943; 1944; 1945; 1955; 1958; 1968; 1971; 1972; 1974; 1975; 1976; 1977; 1978; 1979; 1980; 1983; 1986; 1989; 1991; 1992; 1996; 2002; 2004; 2006; 2007; 2023; 2024; 2028; 2033; 2504; 2505; 2506; 2507; 2508 and/or 2509 (see Table A-2 and FIG. 20) with the p40 subunit and/or (ii) being able to compete with (i.e. is a competitor for) the binding of at least one of the amino acid sequences of SEQ ID NO's: 1940; 1941; 1942; 1943; 1944; 1945; 1955; 1958; 1968; 1971; 1972; 1974; 1975; 1976; 1977; 1978; 1979; 1980; 1983; 1986; 1989; 1991; 1992; 1996; 2002; 2004; 2006; 2007; 2023; 2024; 2028; 2033; 2504; 2505; 2506; 2507; 2508 and/or 2509 (see Table A-2 and FIG. 22) to the p40 subunit.

[0727] In another preferred, but non-limiting aspect, a p40 sequence is chosen from one of the amino acid sequences of SEQ ID NO's: 1940; 1941; 1942; 1943; 1944; 1945; 1955; 1958; 1968; 1971; 1972; 1974; 1975; 1976; 1977; 1978; 1979; 1980; 1983; 1986; 1989; 1991; 1992; 1996; 2002; 2004; 2006; 2007; 2023; 2024; 2028; 2033; 2504; 2505; 2506; 2507; 2508 and/or 2509 (see Table A-2 and FIG. 22).

[0728] D) P40+ Sequences.

[0729] One specific, but non-limiting aspect relates to “p40+ sequences”, which generally are defined herein as amino acid sequences of the invention that are directed against (as defined herein) the p40 subunit (as present in for example IL-23 and IL-12), and that are capable of modulating, neutralizing, blocking and/or inhibiting the binding of a heterodimeric cytokine comprising a p40 subunit to its receptor, and in particular capable of modulating, neutralizing, blocking and/or inhibiting the binding of IL-23 to its (cognate) receptor (in particular, in the alpha-screen assay of described in Example 19 or 22); and/or the binding of IL-12 to its (cognate) receptor (in particular, in the alpha-screen assay of described in Example 19).

[0730] P40+ sequences may generally be as further described herein (for example, in terms of affinity, specificity etc. for p40) for amino acid sequences of the invention in general. Also, as described herein for the amino acid sequences of the invention, the p40+ sequences are preferably such that they form or are capable of forming (optionally after suitable folding) a single antigen binding domain or antigen binding unit, and may for example be amino acid sequences that comprise an immunoglobulin fold, amino acid sequences that are comprised of four framework regions and three CDR's, and may in particular be domain antibodies, single domain antibodies, VHH's, “dAb's” or Nanobodies (all as further described herein), or suitable fragments thereof.

[0731] In one particular aspect, a p40+ sequence may comprise one or more stretches of amino acid residues chosen from the group consisting of:
[0732] a) the amino acid sequences from the “CDR1 Sequences Group 23” (as defined and listed in Table A-1; see also FIG. 14);
[0733] b) amino acid sequences that have at least 80% amino acid identity with at least one of the amino acid sequences from the “CDR1 Sequences Group 23”;
[0734] c) amino acid sequences that have 3, 2, or 1 amino acid difference with at least one of the amino acid sequences from the “CDR1 Sequences Group 23”;
[0735] d) the amino acid sequences from the “CDR2 Sequences Group 25” (as defined and listed in Table A-1; see also FIG. 14);
[0736] e) amino acid sequences that have at least 80% amino acid identity with at least one of the amino acid sequences from the “CDR2 Sequences Group 25”;
[0737] f) amino acid sequences that have 3, 2, or 1 amino acid difference with at least one of the amino acid sequences from the “CDR2 Sequences Group 25”;
[0738] g) the amino acid sequences from the “CDR3 Sequences Group 27” (as defined and listed in Table A-1; see also FIG. 14);
[0739] h) amino acid sequences that have at least 80% amino acid identity with at least one of the amino acid sequences from the “CDR3 Sequences Group 27”;
[0740] i) amino acid sequences that have 3, 2, or 1 amino acid difference with at least one of the amino acid sequences from the “CDR3 Sequences Group 27”;

[0741] or any suitable combination thereof.

[0742] Optionally, when an amino acid sequence of the invention contains one or more amino acid sequences according to b) and/or c), Optional Condition I, Optional Condition II and/or Optional Condition III (all as defined herein) may apply to said amino acid sequence (i.e. compared to the original amino acid sequence according to a)). Also, optionally, when an amino acid sequence of the invention contains one or more amino acid sequences according to e) and/or f), Optional Condition I, Optional Condition II and/or Optional Condition III (all as defined herein) may apply to said amino acid sequence (i.e. compared to the original amino acid sequence according to d)). Also, optionally, when an amino acid sequence of the invention contains one or more amino acid sequences according to h) and/or i), Optional Condition I, Optional Condition II and/or Optional Condition III (all as defined herein) may apply to said amino acid sequence (i.e. compared to the original amino acid sequence according to g)).

[0743] In this specific aspect, the amino acid sequence preferably comprises one or more stretches of amino acid residues chosen from the group consisting of:
[0744] a) the amino acid sequences from the “CDR1 Sequences Group 23”;
[0745] b) the amino acid sequences from the “CDR2 Sequences Group 25”; and
[0746] c) the amino acid sequences from the “CDR3 Sequences Group 27”;

[0747] or any suitable combination thereof.

[0748] Also, preferably, in such an amino acid sequence, at least one of said stretches of amino acid residues forms part of the antigen binding site for binding against p40.

[0749] In a more specific, but again non-limiting aspect, a p40+ sequence may comprise two or more stretches of amino acid residues chosen from the group consisting of:
[0750] a) the amino acid sequences from the “CDR1 Sequences Group 23”;
[0751] b) amino acid sequences that have at least 80% amino acid identity with at least one of the amino acid sequences from the “CDR1 Sequences Group 23”;
[0752] c) amino acid sequences that have 3, 2, or 1 amino acid difference with at least one of the amino acid sequences from the “CDR1 Sequences Group 23”;
[0753] d) the amino acid sequences from the “CDR2 Sequences Group 25”;
[0754] e) amino acid sequences that have at least 80% amino acid identity with at least one of the amino acid sequences from the “CDR2 Sequences Group 25”;
[0755] f) amino acid sequences that have 3, 2, or 1 amino acid difference with at least one of the amino acid sequences from the “CDR2 Sequences Group 25”;
[0756] g) the amino acid sequences from the “CDR3 Sequences Group 27”;
[0757] h) amino acid sequences that have at least 80% amino acid identity with at least one of the amino acid sequences from the “CDR3 Sequences Group 27”;
[0758] i) amino acid sequences that have 3, 2, or 1 amino acid difference with at least one of the amino acid sequences from the “CDR3 Sequences Group 27”;

[0759] such that (i) when the first stretch of amino acid residues corresponds to one of the amino acid sequences according to a), b) or c), the second stretch of amino acid residues corresponds to one of the amino acid sequences according to d), e), f), g), h) or i); (ii) when the first stretch of amino acid residues corresponds to one of the amino acid sequences according to d), e) or f), the second stretch of amino acid residues corresponds to one of the amino acid sequences according to a), b), c), g), h) or i); or (iii) when the first stretch of amino acid residues corresponds to one of the amino acid sequences according to g), h) or i), the second stretch of amino acid residues corresponds to one of the amino acid sequences according to a), b), c), d), e) or f).

[0760] In this specific aspect, the amino acid sequence preferably comprises two or more stretches of amino acid residues chosen from the group consisting of:
[0761] a) the amino acid sequences from the “CDR1 Sequences Group 23”;
[0762] b) the amino acid sequences from the “CDR2 Sequences Group 25”; and
[0763] c) the amino acid sequences from the “CDR3 Sequences Group 27”;

[0764] such that, (i) when the first stretch of amino acid residues corresponds to one of the amino acid sequences from the “CDR1 Sequences Group 23”, the second stretch of amino acid residues corresponds to one of the amino acid sequences from the “CDR2 Sequences Group 25” or from the “CDR3 Sequences Group 27”; (ii) when the first stretch of amino acid residues corresponds to one of the amino acid sequences from the “CDR2 Sequences Group 25”, the second stretch of amino acid residues corresponds to one of the amino acid sequences from the “CDR1 Sequences Group 23” or from the “CDR3 Sequences Group 27”; or (iii) when the first stretch of amino acid residues corresponds to one of the amino acid sequences from the “CDR3 Sequences Group 27”, the second stretch of amino acid residues corresponds to one of the amino acid sequences from the “CDR1 Sequences Group 23” or from the “CDR2 Sequences Group 25”.

[0765] Also, in such an amino acid sequence, the at least two stretches of amino acid residues again preferably form part of the antigen binding site for binding against p40.

[0766] In an even more specific, but non-limiting aspect, a p40+ sequence may comprise three or more stretches of amino acid residues, in which the first stretch of amino acid residues is chosen from the group consisting of:
[0767] a) the amino acid sequences from the “CDR1 Sequences Group 23”;
[0768] b) amino acid sequences that have at least 80% amino acid identity with at least one of the amino acid sequences from the “CDR1 Sequences Group 23”;
[0769] c) amino acid sequences that have 3, 2, or 1 amino acid difference with at least one of the amino acid sequences from the “CDR1 Sequences Group 23”;

[0770] the second stretch of amino acid residues is chosen from the group consisting of:
[0771] d) the amino acid sequences from the “CDR2 Sequences Group 25”;
[0772] e) amino acid sequences that have at least 80% amino acid identity with at least one of the amino acid sequences from the “CDR2 Sequences Group 25”;
[0773] f) amino acid sequences that have 3, 2, or 1 amino acid difference with at least one of the amino acid sequences from the “CDR2 Sequences Group 25”;

[0774] and the third stretch of amino acid residues is chosen from the group consisting of:
[0775] g) the amino acid sequences from the “CDR3 Sequences Group 27”;
[0776] h) amino acid sequences that have at least 80% amino acid identity with at least one of the amino acid sequences from the “CDR3 Sequences Group 27”;
[0777] i) amino acid sequences that have 3, 2, or 1 amino acid difference with at least one of the amino acid sequences from the “CDR3 Sequences Group 27”.

[0778] Preferably, in this specific aspect, the first stretch of amino acid residues is chosen from the group consisting of the amino acid sequences from the “CDR1 Sequences Group 23”; the second stretch of amino acid residues is chosen from the group consisting of the amino acid sequences from the “CDR2 Sequences Group 25”; and the third stretch of amino acid residues is chosen from the group consisting of the amino acid sequences from the “CDR3 Sequences Group 27”.

[0779] Again, preferably, in such an amino acid sequence, the at least three stretches of amino acid residues forms part of the antigen binding site for binding against p40.

[0780] Preferred combinations of such stretches of amino acid sequences will become clear from the further disclosure herein.

[0781] Preferably, in such amino acid sequences the CDR sequences have at least 70% amino acid identity, preferably at least 80% amino acid identity, more preferably at least 90% amino acid identity, such as 95% amino acid identity or more or even essentially 100% amino acid identity with the CDR sequences of at least one of the p40+ sequences listed in Table A-2 and FIG. 23. This degree of amino acid identity can for example be determined by determining the degree of amino acid identity (in a manner described herein) between said amino acid sequence and one or more of the sequences of SEQ ID NO's: 1942; 1946; 1948; 1950; 1952; 1953; 1954; 1956; 1957; 1959; 1962; 1963; 1964; 1965; 1967; 1969; 1970; 1973; 1981; 1982; 1984; 1985; 1987; 1988; 1990; 1993; 1994; 1995; 1997; 1998; 1999; 2000; 2001; 2003; 2005; 2030; 2510; 2511; 2512; 2513; 2514; 2515; 2516; 2517; 2518; 2519; 2520; 2521; 2522; 2523; 2524; 2525; 2526; 2527 and/or 2528 (see Table A-2 and FIG. 23), in which the amino acid residues that form the framework regions are disregarded. Also, such amino acid sequences of the invention can be as further described herein.

[0782] Also, such amino acid sequences are preferably such that they can specifically bind (as defined herein) to the p40 subunit; and more in particular bind to the p40 subunit with an affinity (suitably measured and/or expressed as a K_{D}-value (actual or apparent), a K_{A}-value (actual or apparent), a kₒₙ-rate and/or a k_{off}-rate, or alternatively as an IC₅₀ value (all as further) described herein) that is as defined herein.

[0783] When the amino acid sequence of the invention essentially consists of 4 framework regions (FR1 to FR4, respectively) and 3 complementarity determining regions (CDR1 to CDR3, respectively), the amino acid sequence of the invention is preferably such that:

[0784] CDR1 is chosen from the group consisting of:
[0785] a) the amino acid sequences from the “CDR1 Sequences Group 23”;
[0786] b) amino acid sequences that have at least 80% amino acid identity with at least one of the amino acid sequences from the “CDR1 Sequences Group 23”;
[0787] c) amino acid sequences that have 3, 2, or 1 amino acid difference with at least one of the amino acid sequences from the “CDR1 Sequences Group 23”;

[0788] and/or

[0789] CDR2 is chosen from the group consisting of:
[0790] d) the amino acid sequences from the “CDR2 Sequences Group 25”;
[0791] e) amino acid sequences that have at least 80% amino acid identity with at least one of the amino acid sequences from the “CDR2 Sequences Group 25”;
[0792] f) amino acid sequences that have 3, 2, or 1 amino acid difference with at least one of the amino acid sequences from the “CDR2 Sequences Group 25”;

[0793] and/or

[0794] CDR3 is chosen from the group consisting of:
[0795] g) the amino acid sequences from the “CDR3 Sequences Group 27”;
[0796] h) amino acid sequences that have at least 80% amino acid identity with at least one of the amino acid sequences from the “CDR3 Sequences Group 27”;
[0797] i) amino acid sequences that have 3, 2, or 1 amino acid difference with at least one of the amino acid sequences from the “CDR3 Sequences Group 27”.

[0798] In particular, such an amino acid sequence of the invention may be such that CDR1 is chosen from the group consisting of the amino acid sequences from the “CDR1 Sequences Group 23”; and/or CDR2 is chosen from the group consisting of the amino acid sequences from the “CDR2 Sequences Group 25”; and/or CDR3 is chosen from the group consisting of the amino acid sequences from the “CDR3 Sequences Group 27”.

[0799] In particular, when the amino acid sequence of the invention essentially consists of 4 framework regions (FR1 to FR4, respectively) and 3 complementarity determining regions (CDR1 to CDR3, respectively), the amino acid sequence of the invention is preferably such that:

[0800] CDR1 is chosen from the group consisting of:
[0801] a) the amino acid sequences from the “CDR1 Sequences Group 23”;
[0802] b) amino acid sequences that have at least 80% amino acid identity with at least one of the amino acid sequences from the “CDR1 Sequences Group 23”;
[0803] c) amino acid sequences that have 3, 2, or 1 amino acid difference with at least one of the amino acid sequences from the “CDR1 Sequences Group 23”;

[0804] and

[0805] CDR2 is chosen from the group consisting of:
[0806] d) the amino acid sequences from the “CDR2 Sequences Group 25”;
[0807] e) amino acid sequences that have at least 80% amino acid identity with at least one of the amino acid sequences from the “CDR2 Sequences Group 25”;
[0808] f) amino acid sequences that have 3, 2, or 1 amino acid difference with at least one of the amino acid sequences from the “CDR2 Sequences Group 25”;

[0809] and

[0810] CDR3 is chosen from the group consisting of:
[0811] g) the amino acid sequences from the “CDR3 Sequences Group 27”;
[0812] h) amino acid sequences that have at least 80% amino acid identity with at least one of the amino acid sequences from the “CDR3 Sequences Group 27”;
[0813] i) amino acid sequences that have 3, 2, or 1 amino acid difference with at least one of the amino acid sequences from the “CDR3 Sequences Group 27”; or any suitable fragment of such an amino acid sequence

[0814] In particular, such an amino acid sequence of the invention may be such that CDR1 is chosen from the group consisting of the amino acid sequences from the “CDR1 Sequences Group 23”; and CDR2 is chosen from the group consisting of the amino acid sequences from the “CDR2 Sequences Group 25”; and CDR3 is chosen from the group consisting of the amino acid sequences from the “CDR3 Sequences Group 27”.

[0815] Again, preferred combinations of CDR sequences will become clear from the further description herein.

[0816] Also, such amino acid sequences are preferably such that they can specifically bind (as defined herein) to the p40 subunit; and more in particular bind to the p40 subunit with an affinity (suitably measured and/or expressed as a K_{D}-value (actual or apparent), a K_{A}-value (actual or apparent), a kₒₙ-rate and/or a k_{off}-rate, or alternatively as an IC₅₀ value (all as further) described herein) that is as defined herein.

[0817] In one preferred, but non-limiting aspect, the invention relates to an amino acid sequence that essentially consists of 4 framework regions (FR1 to FR4; respectively) and 3 complementarity determining regions (CDR1 to CDR3, respectively), in which the CDR sequences of said amino acid sequence have at least 70% amino acid identity, preferably at least 80% amino acid identity, more preferably at least 90% amino acid identity, such as 95% amino acid identity or more or even essentially 100% amino acid identity with the CDR sequences of at least one of the amino acid sequences of SEQ ID NO's: 1942; 1946; 1948; 1950; 1952; 1953; 1954; 1956; 1957; 1959; 1962; 1963; 1964; 1965; 1967; 1969; 1970; 1973; 1981; 1982; 1984; 1985; 1987; 1988; 1990; 1993; 1994; 1995; 1997; 1998; 1999; 2000; 2001; 2003; 2005; 2030; 2510; 2511; 2512; 2513; 2514; 2515; 2516; 2517; 2518; 2519; 2520; 2521; 2522; 2523; 2524; 2525; 2526; 2527 and/or 2528 (see Table A-2 and FIG. 23). This degree of amino acid identity can for example be determined by determining the degree of amino acid identity (in a manner described herein) between said amino acid sequence and one or more of the sequences of SEQ ID NO's: 1942; 1946; 1948; 1950; 1952; 1953; 1954; 1956; 1957; 1959; 1962; 1963; 1964; 1965; 1967; 1969; 1970; 1973; 1981; 1982; 1984; 1985; 1987; 1988; 1990; 1993; 1994; 1995; 1997; 1998; 1999; 2000; 2001; 2003; 2005; 2030; 2510; 2511; 2512; 2513; 2514; 2515; 2516; 2517; 2518; 2519; 2520; 2521; 2522; 2523; 2524; 2525; 2526; 2527 and/or 2528 (see Table A-2 and FIG. 23), in which the amino acid residues that form the framework regions are disregarded. Such amino acid sequences of the invention can be as further described herein.

[0818] Some preferred, but non-limiting examples of p40+ sequences are the amino acid sequences of SEQ ID NO's: 1942; 1946; 1948; 1950; 1952; 1953; 1954; 1956; 1957; 1959; 1962; 1963; 1964; 1965; 1967; 1969; 1970; 1973; 1981; 1982; 1984; 1985; 1987; 1988; 1990; 1993; 1994; 1995; 1997; 1998; 1999; 2000; 2001; 2003; 2005; 2030; 2510; 2511; 2512; 2513; 2514; 2515; 2516; 2517; 2518; 2519; 2520; 2521; 2522; 2523; 2524; 2525; 2526; 2527 and/or 2528 (see Table A-2 and FIG. 23). Thus, according to another preferred, but non-limiting aspect of the invention, a p40+ sequence is an amino acid sequence that is directed against (as defined herein) the p40 subunit (as present in for example IL-23 and Il-12) and that are capable of modulating, neutralizing, blocking and/or inhibiting the binding of a heterodimeric cytokine comprising a p40 subunit to its receptor, and in particular capable of modulating, neutralizing, blocking and/or inhibiting the binding of IL-23 to its (cognate) receptor (in particular, in the alpha-screen assay of described in Example 19 or 22); and/or the binding of IL-12 to its (cognate) receptor (in particular, in the alpha-screen assay of described in Example 19), and that either
[0819] a) has at least 70% amino acid identity, preferably at least 80% amino acid identity, more preferably at least 90% amino acid identity, such as 95% amino acid identity or more or even essentially 100% amino acid identity with at least one of the amino acid sequences of SEQ ID NO's: 1942; 1946; 1948; 1950; 1952; 1953; 1954; 1956; 1957; 1959; 1962; 1963; 1964; 1965; 1967; 1969; 1970; 1973; 1981; 1982; 1984; 1985; 1987; 1988; 1990; 1993; 1994; 1995; 1997; 1998; 1999; 2000; 2001; 2003; 2005; 2030; 2510; 2511; 2512; 2513; 2514; 2515; 2516; 2517; 2518; 2519; 2520; 2521; 2522; 2523; 2524; 2525; 2526; 2527 and/or 2528 (see Table A-2 and FIG. 23);

[0820] and/or that
[0821] b) has no more than 20, preferably no more than 10, such as 9, 8, 7, 6, 5, 4, 3, 2 or only one amino acid difference with at least one of the amino acid sequences of SEQ ID NO's: 1942; 1946; 1948; 1950; 1952; 1953; 1954; 1956; 1957; 1959; 1962; 1963; 1964; 1965; 1967; 1969; 1970; 1973; 1981; 1982; 1984; 1985; 1987; 1988; 1990; 1993; 1994; 1995; 1997; 1998; 1999; 2000; 2001; 2003; 2005; 2030; 2510; 2511; 2512; 2513; 2514; 2515; 2516; 2517; 2518; 2519; 2520; 2521; 2522; 2523; 2524; 2525; 2526; 2527 and/or 2528 (see Table A-2 and FIG. 23). Preferably, such an amino acid sequence has no more than a total of 5 (such as 4, 3, 2 or only one) such amino acid differences in the CDR's and/or no more than a total of 5 (such as 4, 3, 2 or only 1) such amino acid differences in the framework sequences;

[0822] and/or that
[0823] c) is either (i) capable of cross-blocking (as defined herein) the interaction of at least one of the amino acid sequences of SEQ ID NO's: 1942; 1946; 1948; 1950; 1952; 1953; 1954; 1956; 1957; 1959; 1962; 1963; 1964; 1965; 1967; 1969; 1970; 1973; 1981; 1982; 1984; 1985; 1987; 1988; 1990; 1993; 1994; 1995; 1997; 1998; 1999; 2000; 2001; 2003; 2005; 2030; 2510; 2511; 2512; 2513; 2514; 2515; 2516; 2517; 2518; 2519; 2520; 2521; 2522; 2523; 2524; 2525; 2526; 2527 and/or 2528 with the p40 subunit and/or (ii) being able to compete with (i.e. is a competitor for) the binding of at least one of the amino acid sequences of SEQ ID NO's: 1942; 1946; 1948; 1950; 1952; 1953; 1954; 1956; 1957; 1959; 1962; 1963; 1964; 1965; 1967; 1969; 1970; 1973; 1981; 1982; 1984; 1985; 1987; 1988; 1990; 1993; 1994; 1995; 1997; 1998; 1999; 2000; 2001; 2003; 2005; 2030; 2510; 2511; 2512; 2513; 2514; 2515; 2516; 2517; 2518; 2519; 2520; 2521; 2522; 2523; 2524; 2525; 2526; 2527 and/or 2528 (see Table A-2 and FIG. 23) to the p40 subunit.

[0824] In another preferred, but non-limiting aspect, a p40+ sequence is chosen from one of the amino acid sequences of SEQ ID NO's: 1942; 1946; 1948; 1950; 1952; 1953; 1954; 1956; 1957; 1959; 1962; 1963; 1964; 1965; 1967; 1969; 1970; 1973; 1981; 1982; 1984; 1985; 1987; 1988; 1990; 1993; 1994; 1995; 1997; 1998; 1999; 2000; 2001; 2003; 2005; 2030; 2510; 2511; 2512; 2513; 2514; 2515; 2516; 2517; 2518; 2519; 2520; 2521; 2522; 2523; 2524; 2525; 2526; 2527 and/or 2528 (see Table A-2 and FIG. 23).

[0825] E) P35 Sequences.

[0826] One specific, but non-limiting aspect relates to “p35 sequences”, which generally are defined herein as amino acid sequences of the invention that are directed against (as defined herein) the p35 subunit (as present in for example IL-12).

[0827] P35 sequences may generally be as further described herein for amino acid sequences of the invention, i.e. in terms of affinity, specificity etc. for p35. Also, as described herein for the amino acid sequences of the invention, the p35 sequences are preferably such that they form or are capable of forming (optionally after suitable folding) a single antigen binding domain or antigen binding unit, and may for example be amino acid sequences that comprise an immunoglobulin fold, amino acid sequences that are comprised of four framework regions and three CDR's, and may in particular be domain antibodies, single domain antibodies, VHH's, “dAb's” or Nanobodies (all as further described herein), or suitable fragments thereof.

[0828] In one particular aspect, a p35 sequence may comprise one or more stretches of amino acid residues chosen from the group consisting of:
[0829] a) the amino acid sequences from the “CDR1 Sequences Group 30” (as defined and listed in Table A-1; see also FIG. 15);
[0830] b) amino acid sequences that have at least 80% amino acid identity with at least one of the amino acid sequences from the “CDR1 Sequences Group 30”;
[0831] c) amino acid sequences that have 3, 2, or 1 amino acid difference with at least one of the amino acid sequences from the “CDR1 Sequences Group 30”;
[0832] d) the amino acid sequences from the “CDR2 Sequences Group 32” (as defined and listed in Table A-1; see also FIG. 15);
[0833] e) amino acid sequences that have at least 80% amino acid identity with at least one of the amino acid sequences from the “CDR2 Sequences Group 32”;
[0834] f) amino acid sequences that have 3, 2, or 1 amino acid difference with at least one of the amino acid sequences from the “CDR2 Sequences Group 32”;
[0835] g) the amino acid sequences from the “CDR3 Sequences Group 34” (as defined and listed in Table A-1; see also FIG. 15);
[0836] h) amino acid sequences that have at least 80% amino acid identity with at least one of the amino acid sequences from the “CDR3 Sequences Group 34”;
[0837] i) amino acid sequences that have 3, 2, or 1 amino acid difference with at least one of the amino acid sequences from the “CDR3 Sequences Group 34”;

[0838] or any suitable combination thereof.

[0839] Optionally, when an amino acid sequence of the invention contains one or more amino acid sequences according to b) and/or c), Optional Condition I, Optional Condition II and/or Optional Condition III (all as defined herein) may apply to said amino acid sequence (i.e. compared to the original amino acid sequence according to a)). Also, optionally, when an amino acid sequence of the invention contains one or more amino acid sequences according to e) and/or f), Optional Condition I, Optional Condition II and/or Optional Condition III (all as defined herein) may apply to said amino acid sequence (i.e. compared to the original amino acid sequence according to d)). Also, optionally, when an amino acid sequence of the invention contains one or more amino acid sequences according to h) and/or i), Optional Condition I, Optional Condition II and/or Optional Condition III (all as defined herein) may apply to said amino acid sequence (i.e. compared to the original amino acid sequence according to g)).

[0840] In this specific aspect, the amino acid sequence preferably comprises one or more stretches of amino acid residues chosen from the group consisting of:
[0841] a) the amino acid sequences from the “CDR1 Sequences Group 30”;
[0842] b) the amino acid sequences from the “CDR2 Sequences Group 32”; and
[0843] c) the amino acid sequences from the “CDR3 Sequences Group 34”;

[0844] or any suitable combination thereof.

[0845] Also, preferably, in such an amino acid sequence, at least one of said stretches of amino acid residues forms part of the antigen binding site for binding against p35.

[0846] In a more specific, but again non-limiting aspect, a p35 sequence may comprise two or more stretches of amino acid residues chosen from the group consisting of:
[0847] a) the amino acid sequences from the “CDR1 Sequences Group 30”;
[0848] b) amino acid sequences that have at least 80% amino acid identity with at least one of the amino acid sequences from the “CDR1 Sequences Group 30”;
[0849] c) amino acid sequences that have 3, 2, or 1 amino acid difference with at least one of the amino acid sequences from the “CDR1 Sequences Group 30”;
[0850] d) the amino acid sequences from the “CDR2 Sequences Group 32”;
[0851] e) amino acid sequences that have at least 80% amino acid identity with at least one of the amino acid sequences from the “CDR2 Sequences Group 32”;
[0852] f) amino acid sequences that have 3, 2, or 1 amino acid difference with at least one of the amino acid sequences from the “CDR2 Sequences Group 32”;
[0853] g) the amino acid sequences from the “CDR3 Sequences Group 34”;
[0854] h) amino acid sequences that have at least 80% amino acid identity with at least one of the amino acid sequences from the “CDR3 Sequences Group 34”;
[0855] i) amino acid sequences that have 3, 2, or 1 amino acid difference with at least one of the amino acid sequences from the “CDR3 Sequences Group 34”;

[0856] such that (i) when the first stretch of amino acid residues corresponds to one of the amino acid sequences according to a), b) or c), the second stretch of amino acid residues corresponds to one of the amino acid sequences according to d), e), f), g), h) or i); (ii) when the first stretch of amino acid residues corresponds to one of the amino acid sequences according to d), e) or f), the second stretch of amino acid residues corresponds to one of the amino acid sequences according to a), b), c), g), h) or i); or (iii) when the first stretch of amino acid residues corresponds to one of the amino acid sequences according to g), h) or i), the second stretch of amino acid residues corresponds to one of the amino acid sequences according to a), b), c), d), e) or f).

[0857] In this specific aspect, the amino acid sequence preferably comprises two or more stretches of amino acid residues chosen from the group consisting of:
[0858] a) the amino acid sequences from the “CDR1 Sequences Group 30”;
[0859] b) the amino acid sequences from the “CDR2 Sequences Group 32”; and
[0860] c) the amino acid sequences from the “CDR3 Sequences Group 34”;

[0861] such that, (i) when the first stretch of amino acid residues corresponds to one of the amino acid sequences from the “CDR1 Sequences Group 30”, the second stretch of amino acid residues corresponds to one of the amino acid sequences from the “CDR2 Sequences Group 32” or from the “CDR3 Sequences Group 34”; (ii) when the first stretch of amino acid residues corresponds to one of the amino acid sequences from the “CDR2 Sequences Group 32”, the second stretch of amino acid residues corresponds to one of the amino acid sequences from the “CDR1 Sequences Group 30” or from the “CDR3 Sequences Group 34”; or (iii) when the first stretch of amino acid residues corresponds to one of the amino acid sequences from the “CDR3 Sequences Group 34”, the second stretch of amino acid residues corresponds to one of the amino acid sequences from the “CDR1 Sequences Group 30” or from the “CDR2 Sequences Group 32”.

[0862] Also, in such an amino acid sequence, the at least two stretches of amino acid residues again preferably form part of the antigen binding site for binding against p35.

[0863] In an even more specific, but non-limiting aspect, a p35 sequence may comprise three or more stretches of amino acid residues, in which the first stretch of amino acid residues is chosen from the group consisting of:
[0864] a) the amino acid sequences from the “CDR1 Sequences Group 30”;
[0865] b) amino acid sequences that have at least 80% amino acid identity with at least one of the amino acid sequences from the “CDR1 Sequences Group 30”;
[0866] c) amino acid sequences that have 3, 2, or 1 amino acid difference with at least one of the amino acid sequences from the “CDR1 Sequences Group 30”;

[0867] the second stretch of amino acid residues is chosen from the group consisting of:
[0868] d) the amino acid sequences from the “CDR2 Sequences Group 32”;
[0869] e) amino acid sequences that have at least 80% amino acid identity with at least one of the amino acid sequences from the “CDR2 Sequences Group 32”;
[0870] f) amino acid sequences that have 3, 2, or 1 amino acid difference with at least one of the amino acid sequences from the “CDR2 Sequences Group 32”;

[0871] and the third stretch of amino acid residues is chosen from the group consisting of:
[0872] g) the amino acid sequences from the “CDR3 Sequences Group 34”;
[0873] h) amino acid sequences that have at least 80% amino acid identity with at least one of the amino acid sequences from the “CDR3 Sequences Group 34”;
[0874] i) amino acid sequences that have 3, 2, or 1 amino acid difference with at least one of the amino acid sequences from the “CDR3 Sequences Group 34”.

[0875] Preferably, in this specific aspect, the first stretch of amino acid residues is chosen from the group consisting of the amino acid sequences from the “CDR1 Sequences Group 30”; the second stretch of amino acid residues is chosen from the group consisting of the amino acid sequences from the “CDR2 Sequences Group 32”; and the third stretch of amino acid residues is chosen from the group consisting of the amino acid sequences from the “CDR3 Sequences Group 34”.

[0876] Again, preferably, in such an amino acid sequence, the at least three stretches of amino acid residues forms part of the antigen binding site for binding against p35.

[0877] Preferred combinations of such stretches of amino acid sequences will become clear from the further disclosure herein.

[0878] Preferably, in such amino acid sequences the CDR sequences have at least 70% amino acid identity, preferably at least 80% amino acid identity, more preferably at least 90% amino acid identity, such as 95% amino acid identity or more or even essentially 100% amino acid identity with the CDR sequences of at least one of the p35 sequences listed in Table A-2 and FIG. 24. This degree of amino acid identity can for example be determined by determining the degree of amino acid identity (in a manner described herein) between said amino acid sequence and one or more of the sequences of SEQ ID NO's: 1947; 1949; 1951; 1960; 1961; 1966; 2008; 2009; 2010; 2011; 2012; 2013; 2014; 2015; 2016; 2017; 2018; 2019; 2020; 2021; 2022; 2025; 2026; 2027; 2029; 2031; 2032; 2034; 2035; 2036; 2037 and/or 2529 (see Table A-2 and FIG. 24), in which the amino acid residues that form the framework regions are disregarded. Also, such amino acid sequences of the invention can be as further described herein.

[0879] Also, such amino acid sequences are preferably such that they can specifically bind (as defined herein) to the p35 subunit; and more in particular bind to the p35 subunit with an affinity (suitably measured and/or expressed as a K_{D}-value (actual or apparent), a K_{A}-value (actual or apparent), a kₒₙ-rate and/or a k_{off}-rate, or alternatively as an IC₅₀ value (all as further) described herein) that is as defined herein.

[0880] When the amino acid sequence of the invention essentially consists of 4 framework regions (FR1 to FR4, respectively) and 3 complementarity determining regions (CDR1 to CDR3, respectively), the amino acid sequence of the invention is preferably such that:

[0881] CDR1 is chosen from the group consisting of:
[0882] a) the amino acid sequences from the “CDR1 Sequences Group 30”;
[0883] b) amino acid sequences that have at least 80% amino acid identity with at least one of the amino acid sequences from the “CDR1 Sequences Group 30”;
[0884] c) amino acid sequences that have 3, 2, or 1 amino acid difference with at least one of the amino acid sequences from the “CDR1 Sequences Group 30”;

[0885] and/or

[0886] CDR2 is chosen from the group consisting of:
[0887] d) the amino acid sequences from the “CDR2 Sequences Group 32”;
[0888] e) amino acid sequences that have at least 80% amino acid identity with at least one of the amino acid sequences from the “CDR2 Sequences Group 32”;
[0889] f) amino acid sequences that have 3, 2, or 1. amino acid difference with at least one of the amino acid sequences from the “CDR2 Sequences Group 32”;

[0890] and/or

[0891] CDR3 is chosen from the group consisting of:
[0892] g) the amino acid sequences from the “CDR3 Sequences Group 34”;
[0893] h) amino acid sequences that have at least 80% amino acid identity with at least one of the amino acid sequences from the “CDR3 Sequences Group 34”;
[0894] i) amino acid sequences that have 3, 2, or 1 amino acid difference with at least one of the amino acid sequences from the “CDR3 Sequences Group 34”.

[0895] In particular, such an amino acid sequence of the invention may be such that CDR1 is chosen from the group consisting of the amino acid sequences from the “CDR1 Sequences Group 30”; and/or CDR2 is chosen from the group consisting of the amino acid sequences from the “CDR2 Sequences Group 32”; and/or CDR3 is chosen from the group consisting of the amino acid sequences from the “CDR3 Sequences Group 34”.

[0896] In particular, when the amino acid sequence of the invention essentially consists of 4 framework regions (FR1 to FR4, respectively) and 3 complementarity determining regions (CDR1 to CDR3, respectively), the amino acid sequence of the invention is preferably such that:

[0897] CDR1 is chosen from the group consisting of:
[0898] a) the amino acid sequences from the “CDR1 Sequences Group 30”;
[0899] b) amino acid sequences that have at least 80% amino acid identity with at least one of the amino acid sequences from the “CDR1 Sequences Group 30”;
[0900] c) amino acid sequences that have 3, 2, or 1 amino acid difference with at least one of the amino acid sequences from the “CDR1 Sequences Group 30”;

[0901] and

[0902] CDR2 is chosen from the group consisting of:
[0903] d) the amino acid sequences from the “CDR2 Sequences Group 32”;
[0904] e) amino acid sequences that have at least 80% amino acid identity with at least one of the amino acid sequences from the “CDR2 Sequences Group 32”;
[0905] f) amino acid sequences that have 3, 2, or 1 amino acid difference with at least one of the amino acid sequences from the “CDR2 Sequences Group 32”;

[0906] and

[0907] CDR3 is chosen from the group consisting of:
[0908] g) the amino acid sequences from the “CDR3 Sequences Group 34”;
[0909] h) amino acid sequences that have at least 80% amino acid identity with at least one of the amino acid sequences from the “CDR3 Sequences Group 34”;
[0910] i) amino acid sequences that have 3, 2, or 1 amino acid difference with at least one of the amino acid sequences from the “CDR3 Sequences Group 34”; or any suitable fragment of such an amino acid sequence

[0911] In particular, such an amino acid sequence of the invention may be such that CDR1 is chosen from the group consisting of the amino acid sequences from the “CDR1 Sequences Group 30”; and CDR2 is chosen from the group consisting of the amino acid sequences from the “CDR2 Sequences Group 32”; and CDR3 is chosen from the group consisting of the amino acid sequences from the “CDR3 Sequences Group 34”.

[0912] Again, preferred combinations of CDR sequences will become clear from the further description herein.

[0913] Also, such amino acid sequences are preferably such that they can specifically bind (as defined herein) to the p35 subunit; and more in particular bind to the p35 subunit with an affinity (suitably measured and/or expressed as a K_{D}-value (actual or apparent), a K_{A}-value (actual or apparent), a kₒₙ-rate and/or a k_{off}-rate, or alternatively as an IC₅₀ value (all as further) described herein) that is as defined herein.

[0914] In one preferred, but non-limiting aspect, the invention relates to an amino acid sequence that essentially consists of 4 framework regions (FR1 to FR4, respectively) and 3 complementarity determining regions (CDR1 to CDR3, respectively), in which the CDR sequences of said amino acid sequence have at least 70% amino acid identity, preferably at least 80% amino acid identity, more preferably at least 90% amino acid identity, such as 95% amino acid identity or more or even essentially 100% amino acid identity with the CDR sequences of at least one of the amino acid sequences of SEQ ID NO's: 1947; 1949; 1951; 1960; 1961; 1966; 2008; 2009; 2010; 2011; 2012; 2013; 2014; 2015; 2016; 2017; 2018; 2019; 2020; 2021; 2022; 2025; 2026; 2027; 2029; 2031; 2032; 2034; 2035; 2036; 2037 and/or 2529 (see Table A-2 and FIG. 24). This degree of amino acid identity can for example be determined by determining the degree of amino acid identity (in a manner described herein) between said amino acid sequence and one or more of the sequences of SEQ ID NO's: 1947; 1949; 1951; 1960; 1961; 1966; 2008; 2009; 2010; 2011; 2012; 2013; 2014; 2015; 2016; 2017; 2018; 2019; 2020; 2021; 2022; 2025; 2026; 2027; 2029; 2031; 2032; 2034; 2035; 2036; 2037 and/or 2529 (see Table A-2 and FIG. 24), in which the amino acid residues that form the framework regions are disregarded. Such amino acid sequences of the invention can be as further described herein.

[0915] Some preferred, but non-limiting examples of p35 sequences are the amino acid sequences of SEQ ID NO's: 1947; 1949; 1951; 1960; 1961; 1966; 2008; 2009; 2010; 2011; 2012; 2013; 2014; 2015; 2016; 2017; 2018; 2019; 2020; 2021; 2022; 2025; 2026; 2027; 2029; 2031; 2032; 2034; 2035; 2036; 2037 and/or 2529 (see Table A-2 and FIG. 24). Thus, according to another preferred, but non-limiting aspect of the invention, a p35 sequence is an amino acid sequence that is directed against (as defined herein) the p35 subunit (as present in for example IL-12) and that either:
[0916] a) has at least 70% amino acid identity, preferably at least 80% amino acid identity, more preferably at least 90% amino acid identity, such as 95% amino acid identity or more or even essentially 100% amino acid identity with at least one of the amino acid sequences of SEQ ID NO's: 1947; 1949; 1951; 1960; 1961; 1966; 2008; 2009; 2010; 2011; 2012; 2013; 2014; 2015; 2016; 2017; 2018; 2019; 2020; 2021; 2022; 2025; 2026; 2027; 2029; 2031; 2032; 2034; 2035; 2036; 2037 and/or 2529 (see Table A-2 and FIG. 24);

[0917] and/or that
[0918] b) has no more than 20, preferably no more than 10, such as 9, 8, 7, 6, 5, 4, 3, 2 or only one amino acid difference with at least one of the amino acid sequences of SEQ ID NO's: 1947; 1949; 1951; 1960; 1961; 1966; 2008; 2009; 2010; 2011; 2012; 2013; 2014; 2015; 2016; 2017; 2018; 2019; 2020; 2021; 2022; 2025; 2026; 2027; 2029; 2031; 2032; 2034; 2035; 2036; 2037 and/or 2529 (see Table A-2 and FIG. 24). Preferably, such an amino acid sequence has no more than a total of 5 (such as 4, 3, 2 or only one) such amino acid differences in the CDR's and/or no more than a total of 5 (such as 4, 3, 2 or only 1) such amino acid differences in the framework sequences;

[0919] and/or that
[0920] c) is either (i) capable of cross-blocking (as defined herein) the interaction of at least one of the amino acid sequences of SEQ ID NO's: 1947; 1949; 1951; 1960; 1961; 1966; 2008; 2009; 2010; 2011; 2012; 2013; 2014; 2015; 2016; 2017; 2018; 2019; 2020; 2021; 2022; 2025; 2026; 2027; 2029; 2031; 2032; 2034; 2035; 2036; 2037 and/or 2529 with the p35 subunit and/or (ii) being able to compete with (i.e. is a competitor for) the binding of at least one of the amino acid sequences of SEQ ID NO's: 1947; 1949; 1951; 1960; 1961; 1966; 2008; 2009; 2010; 2011; 2012; 2013; 2014; 2015; 2016; 2017; 2018; 2019; 2020; 2021; 2022; 2025; 2026; 2027; 2029; 2031; 2032; 2034; 2035; 2036; 2037 and/or 2529 (see Table A-2 and FIG. 24) to the p35 subunit.

[0921] In another preferred, but non-limiting aspect, a p35 sequence is chosen from one of the amino acid sequences of SEQ ID NO's: 1947; 1949; 1951; 1960; 1961; 1966; 2008; 2009; 2010; 2011; 2012; 2013; 2014; 2015; 2016; 2017; 2018; 2019; 2020; 2021; 2022; 2025; 2026; 2027; 2029; 2031; 2032; 2034; 2035; 2036; 2037 and/or 2529 (see Table A-2 and FIG. 24).

[0922] F) IL-27 Sequences.

[0923] One specific, but non-limiting aspect relates to “IL-27 sequences”, which generally are defined herein as amino acid sequences of the invention that are directed against (as defined herein) IL-27 (either against the EBI3 subunit or the p28 subunit).

[0924] IL-27 sequences may generally be as further described herein (for example, in terms of affinity, specificity etc. for IL-27 or one of its subunits) for amino acid sequences of the invention in general. Also, as described herein for the amino acid sequences of the invention, the IL-27 sequences are preferably such that they form or are capable of forming (optionally after suitable folding) a single antigen binding domain or antigen binding unit, and may for example be amino acid sequences that comprise an immunoglobulin fold, amino acid sequences that are comprised of four framework regions and three CDR's, and may in particular be domain antibodies, single domain antibodies, VHH's, “dAb's” or Nanobodies (all as further described herein), or suitable fragments thereof.

[0925] In one particular aspect, an IL-27 sequence may comprise one or more stretches of amino acid residues chosen from the group consisting of:
[0926] a) the amino acid sequences from the “CDR1 Sequences Group 37” (as defined and listed in Table A-1; see also FIG. 16);
[0927] b) amino acid sequences that have at least 80% amino acid identity with at least one of the amino acid sequences from the “CDR1 Sequences Group 37”;
[0928] c) amino acid sequences that have 3, 2, or 1 amino acid difference with at least one of the amino acid sequences from the “CDR1 Sequences Group 37”;
[0929] d) the amino acid sequences from the “CDR2 Sequences Group 39” (as defined and listed in Table A-1; see also FIG. 16);
[0930] e) amino acid sequences that have at least 80% amino acid identity with at least one of the amino acid sequences from the “CDR2 Sequences Group 39”;
[0931] f) amino acid sequences that have 3, 2, or 1 amino acid difference with at least one of the amino acid sequences from the “CDR2 Sequences Group 39”;
[0932] g) the amino acid sequences from the “CDR3 Sequences Group 41” (as defined and listed in Table A-1; see also FIG. 16);
[0933] h) amino acid sequences that have at least 80% amino acid identity with at least one of the amino acid sequences from the “CDR3 Sequences Group 41”;
[0934] i) amino acid sequences that have 3, 2, or 1 amino acid difference with at least one of the amino acid sequences from the “CDR3 Sequences Group 41”;

[0935] or any suitable combination thereof.

[0936] Optionally, when an amino acid sequence of the invention contains one or more amino acid sequences according to b) and/or c), Optional Condition I, Optional Condition II and/or Optional Condition III (all as defined herein) may apply to said amino acid sequence (i.e. compared to the original amino acid sequence according to a)). Also, optionally, when an amino acid sequence of the invention contains one or more amino acid sequences according to e) and/or f), Optional Condition 1, Optional Condition II and/or Optional Condition III (all as defined herein) may apply to said amino acid sequence (i.e. compared to the original amino acid sequence according to d)). Also, optionally, when an amino acid sequence of the invention contains one or more amino acid sequences according to h) and/or i), Optional Condition I, Optional Condition II and/or Optional Condition III (all as defined herein) may apply to said amino acid sequence (i.e. compared to the original amino acid sequence according to g)).

[0937] In this specific aspect, the amino acid sequence preferably comprises one or more stretches of amino acid residues chosen from the group consisting of:
[0938] a) the amino acid sequences from the “CDR1 Sequences Group 37”;
[0939] b) the amino acid sequences from the “CDR2 Sequences Group 39”; and
[0940] c) the amino acid sequences from the “CDR3 Sequences Group 41”;

[0941] or any suitable combination thereof.

[0942] Also, preferably, in such an amino acid sequence, at least one of said stretches of amino acid residues forms part of the antigen binding site for binding against IL-27.

[0943] In a more specific, but again non-limiting aspect, an IL-27 sequence may comprise two or more stretches of amino acid residues chosen from the group consisting of:
[0944] a) the amino acid sequences from the “CDR1 Sequences Group 37”;
[0945] b) amino acid sequences that have at least 80% amino acid identity with at least one of the amino acid sequences from the “CDR1 Sequences Group 37”;
[0946] c) amino acid sequences that have 3, 2, or 1 amino acid difference with at least one of the amino acid sequences from the “CDR1 Sequences Group 37”;
[0947] d) the amino acid sequences from the “CDR2 Sequences Group 39”;
[0948] e) amino acid sequences that have at least 80% amino acid identity with at least one of the amino acid sequences from the “CDR2 Sequences Group 39”;
[0949] f) amino acid sequences that have 3, 2, or 1 amino acid difference with at least one of the amino acid sequences from the “CDR2 Sequences Group 39”;
[0950] g) the amino acid sequences from the “CDR3 Sequences Group 41”;
[0951] h) amino acid sequences that have at least 80% amino acid identity with at least one of the amino acid sequences from the “CDR3 Sequences Group 41”;
[0952] i) amino acid sequences that have 3, 2, or 1 amino acid difference with at least one of the amino acid sequences from the “CDR3 Sequences Group 41”;

[0953] such that (i) when the first stretch of amino acid residues corresponds to one of the amino acid sequences according to a), b) or c), the second stretch of amino acid residues corresponds to one of the amino acid sequences according to d), e), f), g), h) or i); (ii) when the first stretch of amino acid residues corresponds to one of the amino acid sequences according to d), e) or f), the second stretch of amino acid residues corresponds to one of the amino acid sequences according to a), b), c), g), h) or i); or (iii) when the first stretch of amino acid residues corresponds to one of the amino acid sequences according to g), h) or i), the second stretch of amino acid residues corresponds to one of the amino acid sequences according to a), b), c), d), e) or f).

[0954] In this specific aspect, the amino acid sequence preferably comprises two or more stretches of amino acid residues chosen from the group consisting of:
[0955] a) the amino acid sequences from the “CDR1 Sequences Group 37”;
[0956] b) the amino acid sequences from the “CDR2 Sequences Group 39”; and
[0957] c) the amino acid sequences from the “CDR3 Sequences Group 41”;

[0958] such that, (i) when the first stretch of amino acid residues corresponds to one of the amino acid sequences from the “CDR1 Sequences Group 37”, the second stretch of amino acid residues corresponds to one of the amino acid sequences from the “CDR2 Sequences Group 39” or from the “CDR3 Sequences Group 41”; (ii) when the first stretch of amino acid residues corresponds to one of the amino acid sequences from the “CDR2 Sequences Group 39”, the second stretch of amino acid residues corresponds to one of the amino acid sequences from the “CDR1 Sequences Group 37” or from the “CDR3 Sequences Group 41”; or (iii) when the first stretch of amino acid residues corresponds to one of the amino acid sequences from the “CDR3 Sequences Group 41”, the second stretch of amino acid residues corresponds to one of the amino acid sequences from the “CDR1 Sequences Group 37” or from the “CDR2 Sequences Group 39”.

[0959] Also, in such an amino acid sequence, the at least two stretches of amino acid residues again preferably form part of the antigen binding site for binding against IL-27.

[0960] In an even more specific, but non-limiting aspect, an IL-27 sequence may comprise three or more stretches of amino acid residues, in which the first stretch of amino acid residues is chosen from the group consisting of:
[0961] a) the amino acid sequences from the “CDR1 Sequences Group 37”;
[0962] b) amino acid sequences that have at least 80% amino acid identity with at least one of the amino acid sequences from the “CDR1 Sequences Group 37”;
[0963] c) amino acid sequences that have 3, 2, or 1 amino acid difference with at least one of the amino acid sequences from the “CDR1 Sequences Group 37”;

[0964] the second stretch of amino acid residues is chosen from the group consisting of:
[0965] d) the amino acid sequences from the “CDR2 Sequences Group 39”;
[0966] e) amino acid sequences that have at least 80% amino acid identity with at least one of the amino acid sequences from the “CDR2 Sequences Group 39”;
[0967] f) amino acid sequences that have 3, 2, or 1 amino acid difference with at least one of the amino acid sequences from the “CDR2 Sequences Group 39”;

[0968] and the third stretch of amino acid residues is chosen from the group consisting of:
[0969] g) the amino acid sequences from the “CDR3 Sequences Group 41”;
[0970] h) amino acid sequences that have at least 80% amino acid identity with at least one of the amino acid sequences from the “CDR3 Sequences Group 41”;
[0971] i) amino acid sequences that have 3, 2, or 1 amino acid difference with at least one of the amino acid sequences from the “CDR3 Sequences Group 41”.

[0972] Preferably, in this specific aspect, the first stretch of amino acid residues is chosen from the group consisting of the amino acid sequences from the “CDR1 Sequences Group 37”; the second stretch of amino acid residues is chosen from the group consisting of the amino acid sequences from the “CDR2 Sequences Group 39”; and the third stretch of amino acid residues is chosen from the group consisting of the amino acid sequences from the “CDR3 Sequences Group 41”.

[0973] Again, preferably, in such an amino acid sequence, the at least three stretches of amino acid residues forms part of the antigen binding site for binding against IL-27.

[0974] Preferred combinations of such stretches of amino acid sequences will become clear from the further disclosure herein.

[0975] Preferably, in such amino acid sequences the CDR sequences have at least 70% amino acid identity, preferably at least 80% amino acid identity, more preferably at least 90% amino acid identity, such as 95% amino acid identity or more or even essentially 100% amino acid identity with the CDR sequences of at least one of the IL-27 sequences listed in Table A-2 and FIG. 26. This degree of amino acid identity can for example be determined by determining the degree of amino acid identity (in a manner described herein) between said amino acid sequence and one or more of the sequences of SEQ ID NO's: 2038; 2039; 2040; 2041; 2042; 2043; 2044; 2045; 2046; 2047; 2048; 2049; 2050; 2051; 2052; 2053; 2054; 2055; 2056; 2057; 2058; 2059; 2060; 2061; 2062; 2063; 2064; 2065; 2066; 2067; 2068; 2069; 2070; 2071; 2072; 2073; 2074; 2075 and/or 2076 (see Table A-2 and FIG. 26), in which the amino acid residues that form the framework regions are disregarded. Also, such amino acid sequences of the invention can be as further described herein.

[0976] Also, such amino acid sequences are preferably such that they can specifically bind (as defined herein) to IL-27 (i.e. to the EBI3 subunit or the p28 subunit); and more in particular bind to IL-27 with an affinity (suitably measured and/or expressed as a K_{D}-value (actual or apparent), a K_{A}-value (actual or apparent), a kₒₙ-rate and/or a k_{off}-rate, or alternatively as an IC₅₀ value (all as further) described herein) that is as defined herein.

[0977] When the amino acid sequence of the invention essentially consists of 4 framework regions (FR1 to FR4, respectively) and 3 complementarity determining regions (CDR1 to CDR3, respectively), the amino acid sequence of the invention is preferably such that:

[0978] CDR1 is chosen from the group consisting of:
[0979] a) the amino acid sequences from the “CDR1 Sequences Group 37”;
[0980] b) amino acid sequences that have at least 80% amino acid identity with at least one of the amino acid sequences from the “CDR1 Sequences Group 37”;
[0981] c) amino acid sequences that have 3, 2, or 1 amino acid difference with at least one of the amino acid sequences from the “CDR1 Sequences Group 37”;

[0982] and/or

[0983] CDR2 is chosen from the group consisting of:
[0984] d) the amino acid sequences from the “CDR2 Sequences Group 39”;
[0985] e) amino acid sequences that have at least 80% amino acid identity with at least one of the amino acid sequences from the “CDR2 Sequences Group 39”;
[0986] f) amino acid sequences that have 3, 2, or 1 amino acid difference with at least one of the amino acid sequences from the “CDR2 Sequences Group 39”;

[0987] and/or

[0988] CDR3 is chosen from the group consisting of:
[0989] g) the amino acid sequences from the “CDR3 Sequences Group 41”;
[0990] h) amino acid sequences that have at least 80% amino acid identity with at least one of the amino acid sequences from the “CDR3 Sequences Group 41”;
[0991] i) amino acid sequences that have 3, 2, or 1 amino acid difference with at least one of the amino acid sequences from the “CDR3 Sequences Group 41”.

[0992] In particular, such an amino acid sequence of the invention may be such that CDR1 is chosen from the group consisting of the amino acid sequences from the “CDR1 Sequences Group 37”; and/or CDR2 is chosen from the group consisting of the amino acid sequences from the “CDR2 Sequences Group 39”; and/or CDR3 is chosen from the group consisting of the amino acid sequences from the “CDR3 Sequences Group 41”.

[0993] In particular, when the amino acid sequence of the invention essentially consists of 4 framework regions (FR1 to FR4, respectively) and 3 complementarity determining regions (CDR1 to CDR3, respectively), the amino acid sequence of the invention is preferably such that:

[0994] CDR1 is chosen from the group consisting of:
[0995] a) the amino acid sequences from the “CDR1 Sequences Group 37”;
[0996] b) amino acid sequences that have at least 80% amino acid identity with at least one of the amino acid sequences from the “CDR1 Sequences Group 37”;
[0997] c) amino acid sequences that have 3, 2, or 1 amino acid difference with at least one of the amino acid sequences from the “CDR1 Sequences Group 37”;

[0998] and

[0999] CDR2 is chosen from the group consisting of:
[1000] d) the amino acid sequences from the “CDR2 Sequences Group 39”;
[1001] e) amino acid sequences that have at least 80% amino acid identity with at least one of the amino acid sequences from the “CDR2 Sequences Group 39”;
[1002] f) amino acid sequences that have 3, 2, or 1 amino acid difference with at least one of the amino acid sequences from the “CDR2 Sequences Group 39”;

[1003] and

[1004] CDR3 is chosen from the group consisting of:
[1005] g) the amino acid sequences from the “CDR3 Sequences Group 41”;
[1006] h) amino acid sequences that have at least 80% amino acid identity with at least one of the amino acid sequences from the “CDR3 Sequences Group 41”;
[1007] i) amino acid sequences that have 3, 2, or 1 amino acid difference with at least one of the amino acid sequences from the “CDR3 Sequences Group 41”; or any suitable fragment of such an amino acid sequence

[1008] In particular, such an amino acid sequence of the invention may be such that CDR1 is chosen from the group consisting of the amino acid sequences from the “CDR1 Sequences Group 37”; and CDR2 is chosen from the group consisting of the amino acid sequences from the “CDR2 Sequences Group 39”; and CDR3 is chosen from the group consisting of the amino acid sequences from the “CDR3. Sequences Group 41”.

[1009] Again, preferred combinations of CDR sequences will become clear from the further description herein.

[1010] Also, such amino acid sequences are preferably such that they can specifically bind (as defined herein) to IL-27; and more in particular bind to IL-27 with an affinity (suitably measured and/or expressed as a K_{D}-value (actual or apparent), a K_{A}-value (actual or apparent), a kₒₙ-rate and/or a k_{off}-rate, or alternatively as an IC₅₀ value (all as further) described herein) that is as defined herein.

[1011] In one preferred, but non-limiting aspect, the invention relates to an amino acid sequence that essentially consists of 4 framework regions (FR1 to FR4, respectively) and 3 complementarity determining regions (CDR1 to CDR3, respectively), in which the CDR sequences of said amino acid sequence have at least 70% amino acid identity, preferably at least 80% amino acid identity, more preferably at least 90% amino acid identity, such as 95% amino acid identity or more or even essentially 100% amino acid identity with the CDR sequences of at least one of the amino acid sequences of SEQ ID NO's: 2038; 2039; 2040; 2041; 2042; 2043; 2044; 2045; 2046; 2047; 2048; 2049; 2050; 2051; 2052; 2053; 2054; 2055; 2056; 2057; 2058; 2059; 2060; 2061; 2062; 2063; 2064; 2065; 2066; 2067; 2068; 2069; 2070; 2071; 2072; 2073; 2074; 2075 and/or 2076 (see Table A-2 and FIG. 26). This degree of amino acid identity can for example be determined by determining the degree of amino acid identity (in a manner described herein) between said amino acid sequence and one or more of the sequences of SEQ ID NO's: 2038; 2039; 2040; 2041; 2042; 2043; 2044; 2045; 2046; 2047; 2048; 2049; 2050; 2051; 2052; 2053; 2054; 2055; 2056; 2057; 2058; 2059; 2060; 2061; 2062; 2063; 2064; 2065; 2066; 2067; 2068; 2069; 2070; 2071; 2072; 2073; 2074; 2075 and/or 2076 (see Table A-2 and FIG. 26), in which the amino acid residues that form the framework regions are disregarded. Such amino acid sequences of the invention can be as further described herein.

[1012] Some preferred, but non-limiting examples of IL-27 sequences are the amino acid sequences of SEQ ID NO's: 2038; 2039; 2040; 2041; 2042; 2043; 2044; 2045; 2046; 2047; 2048; 2049; 2050; 2051; 2052; 2053; 2054; 2055; 2056; 2057; 2058; 2059; 2060; 2061; 2062; 2063; 2064; 2065; 2066; 2067; 2068; 2069; 2070; 2071; 2072; 2073; 2074; 2075 and/or 2076 (see Table A-2 and FIG. 26). Thus, according to another preferred, but non-limiting aspect of the invention, an IL-27 sequence is an amino acid sequence that is directed against (as defined herein) IL-27 and that either:
[1013] a) has at least 70% amino acid identity, preferably at least 80% amino acid identity, more preferably at least 90% amino acid identity, such as 95% amino acid identity or more or even essentially 100% amino acid identity with at least one of the amino acid sequences of SEQ ID NO's: 2038; 2039; 2040; 2041; 2042; 2043; 2044; 2045; 2046; 2047; 2048; 2049; 2050; 2051; 2052; 2053; 2054; 2055; 2056; 2057; 2058; 2059; 2060; 2061; 2062; 2063; 2064; 2065; 2066; 2067; 2068; 2069; 2070; 2071; 2072; 2073; 2074; 2075 and/or 2076 (see Table A-2 and FIG. 26);

[1014] and/or that
[1015] b) has no more than 20, preferably no more than 10, such as 9, 8, 7, 6, 5, 4, 3, 2 or only one amino acid difference with at least one of the amino acid sequences of SEQ ID NO's: 2038; 2039; 2040; 2041; 2042; 2043; 2044; 2045; 2046; 2047; 2048; 2049; 2050; 2051; 2052; 2053; 2054; 2055; 2056; 2057; 2058; 2059; 2060; 2061; 2062; 2063; 2064; 2065; 2066; 2067; 2068; 2069; 2070; 2071; 2072; 2073; 2074; 2075 and/or 2076 (see Table A-2 and FIG. 26). Preferably, such an amino acid sequence has no more than a total of 5 (such as 4, 3, 2 or only one) such amino acid differences in the CDR's and/or no more than a total of 5 (such as 4, 3, 2 or only 1) such amino acid differences in the framework sequences;

[1016] and/or that
[1017] c) is either (i) capable of cross-blocking (as defined herein) the interaction of at least one of the amino acid sequences of SEQ ID NO's: 2038; 2039; 2040; 2041; 2042; 2043; 2044; 2045; 2046; 2047; 2048; 2049; 2050; 2051; 2052; 2053; 2054; 2055; 2056; 2057; 2058; 2059; 2060; 2061; 2062; 2063; 2064; 2065; 2066; 2067; 2068; 2069; 2070; 2071; 2072; 2073; 2074; 2075 and/or 2076 with IL-27 and/or (ii) being able to compete with (i.e. is a competitor for) the binding of at least one of the amino acid sequences of SEQ ID NO's: 2038; 2039; 2040; 2041; 2042; 2043; 2044; 2045; 2046; 2047; 2048; 2049; 2050; 2051; 2052; 2053; 2054; 2055; 2056; 2057; 2058; 2059; 2060; 2061; 2062; 2063; 2064; 2065; 2066; 2067; 2068; 2069; 2070; 2071; 2072; 2073; 2074; 2075 and/or 2076 (see Table A-2 and FIG. 26) to IL-27.

[1018] In another preferred, but non-limiting aspect, an IL-27 sequence is chosen from one of the amino acid sequences of SEQ ID NO's: 2038; 2039; 2040; 2041; 2042; 2043; 2044; 2045; 2046; 2047; 2048; 2049; 2050; 2051; 2052; 2053; 2054; 2055; 2056; 2057; 2058; 2059; 2060; 2061; 2062; 2063; 2064; 2065; 2066; 2067; 2068; 2069; 2070; 2071; 2072; 2073; 2074; 2075 and/or 2076 (see Table A-2 and FIG. 26).

[1019] G) IL-12Rb1 sequences. One specific, but non-limiting aspect relates to “IL-12Rb1 sequences”, which generally are defined herein as amino acid sequences of the invention that are directed against (as defined herein) the IL-12Rb1 subunit, as present in both the receptor for IL-12 as well as the receptor for IL-23 (and thereby, against both the receptor for IL-12 as well as IL-23).

[1020] IL-12Rb1 sequences may generally be as further described herein (for example, in terms of affinity, specificity etc. for IL-12Rb1) for amino acid sequences of the invention in general. Also, as described herein for the amino acid sequences of the invention, the IL-

[1021] 12Rb1 sequences are preferably such that they form or are capable of forming (optionally after suitable folding) a single antigen binding domain or antigen binding unit, and may for example be amino acid sequences that comprise an immunoglobulin fold, amino acid sequences that are comprised of four framework regions and three CDR's, and may in particular be domain antibodies, single domain antibodies, VHH's, “dAb's” or Nanobodies (all as further described herein), or suitable fragments thereof.

[1022] In one particular aspect, an IL-l2Rb1 sequence may comprise one or more stretches of amino acid residues chosen from the group consisting of:
[1023] a) the amino acid sequences from the “CDR1 Sequences Group 44” (as defined and listed in Table A-1; see also FIG. 17);
[1024] b) amino acid sequences that have at least 80% amino acid identity with at least one of the amino acid sequences from the “CDR1 Sequences Group 44”;
[1025] c) amino acid sequences that have 3, 2, or I amino acid difference with at least one of the amino acid sequences from the “CDR1 Sequences Group 44”;
[1026] d) the amino acid sequences from the “CDR2 Sequences Group 46” (as defined and listed in Table A-1; see also FIG. 17);
[1027] e) amino acid sequences that have at least 80% amino acid identity with at least one of the amino acid sequences from the “CDR2 Sequences Group 46”;
[1028] amino acid sequences that have 3, 2, or 1 amino acid difference with at least one of the amino acid sequences from the “CDR2 Sequences Group 46”;
[1029] g) the amino acid sequences from the “CDR3 Sequences Group 48” (as defined and listed in Table A-1; see also FIG. 17);
[1030] h) amino acid sequences that have at least 80% amino acid identity with at least one of the amino acid sequences from the “CDR3 Sequences Group 48”;
[1031] i) amino acid sequences that have 3, 2, or 1 amino acid difference with at least one of the amino acid sequences from the “CDR3 Sequences Group 48”;
   [1032] or any suitable combination thereof.

[1033] Optionally, when an amino acid sequence of the invention contains one or more amino acid sequences according to b) and/or c), Optional Condition I, Optional Condition II and/or Optional Condition III (all as defined herein) may apply to said amino acid sequence (i.e. compared to the original amino acid sequence according to a)). Also, optionally, when an amino acid sequence of the invention contains one or more amino acid sequences according to e) and/or f), Optional Condition I, Optional Condition II and/or Optional Condition III (all as defined herein) may apply to said amino acid sequence (i.e. compared to the original amino acid sequence according to d)). Also, optionally, when an amino acid sequence of the invention contains one or more amino acid sequences according to h) and/or i), Optional Condition I, Optional Condition II and/or Optional Condition III (all as defined herein) may apply to said amino acid sequence (i.e. compared to the original amino acid sequence according to g)).

[1034] In this specific aspect, the amino acid sequence preferably comprises one or more stretches of amino acid residues chosen from the group consisting of:
[1035] a) the amino acid sequences from the “CDR1 Sequences Group 44”;
[1036] b) the amino acid sequences from the “CDR2 Sequences Group 46”; and
[1037] c) the amino acid sequences from the “CDR3 Sequences Group 48”;
   [1038] or any suitable combination thereof.

[1039] Also, preferably, in such an amino acid sequence, at least one of said stretches of amino acid residues forms part of the antigen binding site for binding against IL-I2Rb1.

[1040] In a more specific, but again non-limiting aspect, an IL-12Rb1 sequence may comprise two or more stretches of amino acid residues chosen from the group consisting of:
[1041] a) the amino acid sequences from the “CDR1 Sequences Group 44”;
[1042] b) amino acid sequences that have at least 80% amino acid identity with at least one of the amino acid sequences from the “CDR1 Sequences Group 44”;
[1043] c) amino acid sequences that have 3, 2, or 1 amino acid difference with at least one of the amino acid sequences from the “CDR1 Sequences Group 44”;
[1044] d) the amino acid sequences from the “CDR2 Sequences Group 46”;
[1045] e) amino acid sequences that have at least 80% amino acid identity with at least one of the amino acid sequences from the “CDR2 Sequences Group 46”;
[1046] f) amino acid sequences that have 3, 2, or 1 amino acid difference with at least one of the amino acid sequences from the “CDR2 Sequences Group 46”;
[1047] g) the amino acid sequences from the “CDR3 Sequences Group 48”;
[1048] h) amino acid sequences that have at least 80% amino acid identity with at least one of the amino acid sequences from the “CDR3 Sequences Group 48”;
[1049] i) amino acid sequences that have 3, 2, or 1 amino acid difference with at least one of the amino acid sequences from the “CDR3 Sequences Group 48”;

[1050] such that (i) when the first stretch of amino acid residues corresponds to one of the amino acid sequences according to a), b) or c), the second stretch of amino acid residues corresponds to one of the amino acid sequences according to d), e), f), g), h) or i); (ii) when the first stretch of amino acid residues corresponds to one of the amino acid sequences according to d), e) or f), the second stretch of amino acid residues corresponds to one of the amino acid sequences according to a), b), c), g), h) or i); or (iii) when the first stretch of amino acid residues corresponds to one of the amino acid sequences according to g), h) or i), the second stretch of amino acid residues corresponds to one of the amino acid sequences according to a), b), c), d), e) or f).

[1051] In this specific aspect, the amino acid sequence preferably comprises two or more stretches of amino acid residues chosen from the group consisting of:
[1052] a) the amino acid sequences from the “CDR1 Sequences Group 44”;
[1053] b) the amino acid sequences from the “CDR2 Sequences Group 46”; and
[1054] c) the amino acid sequences from the “CDR3 Sequences Group 48”;

[1055] such that, (i) when the first stretch of amino acid residues corresponds to one of the amino acid sequences from the “CDR1 Sequences Group 44”, the second stretch of amino acid residues corresponds to one of the amino acid sequences from the “CDR2 Sequences Group 46” or from the “CDR3 Sequences Group 48”; (ii) when the first stretch of amino acid residues corresponds to one of the amino acid sequences from the “CDR2 Sequences Group 46”, the second stretch of amino acid residues corresponds to one of the amino acid sequences from the “CDR1 Sequences Group 44” or from the “CDR3 Sequences Group 48”; or (iii) when the first stretch of amino acid residues corresponds to one of the amino acid sequences from the “CDR3 Sequences Group 48”, the second stretch of amino acid residues corresponds to one of the amino acid sequences from the “CDR1 Sequences Group 44” or from the “CDR2 Sequences Group 46”.

[1056] Also, in such an amino acid sequence, the at least two stretches of amino acid residues again preferably form part of the antigen binding site for binding against IL-12Rb1.

[1057] In an even more specific, but non-limiting aspect, an IL-12Rb1 sequence may comprise three or more stretches of amino acid residues, in which the first stretch of amino acid residues is chosen from the group consisting of:
[1058] a) the amino acid sequences from the “CDR1 Sequences Group 44”;
[1059] b) amino acid sequences that have at least 80% amino acid identity with at least one of the amino acid sequences from the “CDR1 Sequences Group 44”;
[1060] c) amino acid sequences that have 3, 2, or 1 amino acid difference with at least one of the amino acid sequences from the “CDR1 Sequences Group 44”;
   [1061] the second stretch of amino acid residues is chosen from the group consisting of:
[1062] d) the amino acid sequences from the “CDR2 Sequences Group 46”;
[1063] e) amino acid sequences that have at least 80% amino acid identity with at least one of the amino acid sequences from the “CDR2 Sequences Group 46”;
[1064] f) amino acid sequences that have 3, 2, or 1 amino acid difference with at least one of the amino acid sequences from the “CDR2 Sequences Group 46”;
   [1065] and the third stretch of amino acid residues is chosen from the group consisting of:
[1066] g) the amino acid sequences from the “CDR3 Sequences Group 48”;
[1067] h) amino acid sequences that have at least 80% amino acid identity with at least one of the amino acid sequences from the “CDR3 Sequences Group 48”;
[1068] i) amino acid sequences that have 3, 2, or 1 amino acid difference with at least one of the amino acid sequences from the “CDR3 Sequences Group 48”.

[1069] Preferably, in this specific aspect, the first stretch of amino acid residues is chosen from the group consisting of the amino acid sequences from the “CDR1 Sequences Group 44”; the second stretch of amino acid residues is chosen from the group consisting of the amino acid sequences from the “CDR2 Sequences Group 46”; and the third stretch of amino acid residues is chosen from the group consisting of the amino acid sequences from the “CDR3 Sequences Group 48”.

[1070] Again, preferably, in such an amino acid sequence, the at least three stretches of amino acid residues forms part of the antigen binding site for binding against IL-12Rb1.

[1071] Preferred combinations of such stretches of amino acid sequences will become clear from the further disclosure herein.

[1072] Preferably, in such amino acid sequences the CDR sequences have at least 70% amino acid identity, preferably at least 80% amino acid identity, more preferably at least 90% amino acid identity, such as 95% amino acid identity or more or even essentially 100% amino acid identity with the CDR sequences of at least one of the IL-12Rb1 sequences listed in Table A-2 and FIG. 27. This degree of amino acid identity can for example be determined by determining the degree of amino acid identity (in a manner described herein) between said amino acid sequence and one or more of the sequences of SEQ ID NO's: 2077; 2078; 2079; 2080; 2081; 2082; 2083; 2084; 2085; 2086; 2087; 2088; 2089; 2090; 2091; 2092; 2093; 2094; 2095; 2096; 2097; 2098; 2099; 2100; 2101; 2102 and/or 2103 (see Table A-2 and FIG. 27), in which the amino acid residues that form the framework regions are disregarded. Also, such amino acid sequences of the invention can be as further described herein.

[1073] Also, such amino acid sequences are preferably such that they can specifically bind (as defined herein) to the IL-12Rb1 subunit (i.e. as present in the receptor for IL-12 and/or in the receptor for IL-23); and more in particular bind to the IL-12Rb1 subunit with an affinity (suitably measured and/or expressed as a K_{D}-value (actual or apparent), a K_{A}-value (actual or apparent), a kₒₙ-rate and/or a k_{off}-rate, or alternatively as an IC₅₀ value (all as further) described herein) that is as defined herein.

[1074] When the amino acid sequence of the invention essentially consists of 4 framework regions (FR1 to FR4, respectively) and 3 complementarity determining regions (CDR1 to CDR3, respectively), the amino acid sequence of the invention is preferably such that:
[1075] CDR1 is chosen from the group consisting of
[1076] a) the amino acid sequences from the “CDR1 Sequences Group 44”;
[1077] b) amino acid sequences that have at least 80% amino acid identity with at least one of the amino acid sequences from the “CDR1 Sequences Group 44”;
[1078] c) amino acid sequences that have 3, 2, or 1 amino acid difference with at least one of the amino acid sequences from the “CDR1 Sequences Group 44”;
   [1079] and/or
   [1080] CDR2 is chosen from the group consisting of:
[1081] d) the amino acid sequences from the “CDR2 Sequences Group 46”;
[1082] e) amino acid sequences that have at least 80% amino acid identity with at least one of the amino acid sequences from the “CDR2 Sequences Group 46”;
[1083] f) amino acid sequences that have 3, 2, or 1 amino acid difference with at least one of the amino acid sequences from the “CDR2 Sequences Group 46”;
   [1084] and/or
   [1085] CDR3 is chosen from the group consisting of:
[1086] g) the amino acid sequences from the “CDR3 Sequences Group 48”;
[1087] h) amino acid sequences that have at least 80% amino acid identity with at least one of the amino acid sequences from the “CDR3 Sequences Group 48”;
[1088] i) amino acid sequences that have 3, 2, or 1 amino acid difference with at least one of the amino acid sequences from the “CDR3 Sequences Group 48”.

[1089] In particular, such an amino acid sequence of the invention may be such that CDR1 is chosen from the group consisting of the amino acid sequences from the “CDR1 Sequences Group 44”; and/or CDR2 is chosen from the group consisting of the amino acid sequences from the “CDR2 Sequences Group 46”; and/or CDR3 is chosen from the group consisting of the amino acid sequences from the “CDR3 Sequences Group 48”.

[1090] In particular, when the amino acid sequence of the invention essentially consists of 4 framework regions (FR1 to FR4, respectively) and 3 complementarity determining regions (CDR1 to CDR3, respectively), the amino acid sequence of the invention is preferably such that:
[1091] CDR1 is chosen from the group consisting of:
[1092] a) the amino acid sequences from the “CDR1 Sequences Group 44”;
[1093] b) amino acid sequences that have at least 80% amino acid identity with at least one of the amino acid sequences from the “CDR1 Sequences Group 44”;
[1094] c) amino acid sequences that have 3, 2, or 1 amino acid difference with at least one of the amino acid sequences from the “CDR1 Sequences Group 44”;
   [1095] and
   [1096] CDR2 is chosen from the group consisting of:
[1097] d) the amino acid sequences from the “CDR2 Sequences Group 46”;
[1098] e) amino acid sequences that have at least 80% amino acid identity with at least one of the amino acid sequences from the “CDR2 Sequences Group 46”;
[1099] f) amino acid sequences that have 3, 2, or 1 amino acid difference with at least one of the amino acid sequences from the “CDR2 Sequences Group 46”;
   [1100] and
   [1101] CDR3 is chosen from the group consisting of:
[1102] g) the amino acid sequences from the “CDR3 Sequences Group 48”;
[1103] h) amino acid sequences that have at least 80% amino acid identity with at least one of the amino acid sequences from the “CDR3 Sequences Group 48”;
[1104] i) amino acid sequences that have 3, 2, or 1 amino acid difference with at least one of the amino acid sequences from the “CDR3 Sequences Group 48”; or any suitable fragment of such an amino acid sequence

[1105] In particular, such an amino acid sequence of the invention may be such that CDR1 is chosen from the group consisting of the amino acid sequences from the “CDR1 Sequences Group 44”; and CDR2 is chosen from the group consisting of the amino acid sequences from the “CDR2 Sequences Group 46”; and CDR3 is chosen from the group consisting of the amino acid sequences from the “CDR3 Sequences Group 48”.

[1106] Again, preferred combinations of CDR sequences will become clear from the further description herein.

[1107] Also, such amino acid sequences are preferably such that they can specifically bind (as defined herein) to IL-12Rb1; and more in particular bind to IL-12Rb1 with an affinity (suitably measured and/or expressed as a K_{D}-value (actual or apparent), a K_{A}-value (actual or apparent), a kₒₙ-rate and/or a k_{off}-rate, or alternatively as an IC₅₀ value (all as further) described herein) that is as defined herein.

[1108] In one preferred, but non-limiting aspect, the invention relates to an amino acid sequence that essentially consists of 4 framework regions (FR1 to FR4, respectively) and 3 complementarity determining regions (CDR1 to CDR3, respectively), in which the CDR sequences of said amino acid sequence have at least 70% amino acid identity, preferably at least 80% amino acid identity, more preferably at least 90% amino acid identity, such as 95% amino acid identity or more or even essentially 100% amino acid identity with the CDR sequences of at least one of the amino acid sequences of SEQ ID NO's: 2077; 2078; 2079; 2080; 2081; 2082; 2083; 2084; 2085; 2086; 2087; 2088; 2089; 2090; 2091; 2092; 2093; 2094; 2095; 2096; 2097; 2098; 2099; 2100; 2101; 2102 and/or 2103 (see Table A-2 and FIG. 27). This degree of amino acid identity can for example be determined by determining the degree of amino acid identity (in a manner described herein) between said amino acid sequence and one or more of the sequences of SEQ ID NO's: 2077; 2078; 2079; 2080; 2081; 2082; 2083; 2084; 2085; 2086; 2087; 2088; 2089; 2090; 2091; 2092; 2093; 2094; 2095; 2096; 2097; 2098; 2099; 2100; 2101; 2102 and/or 2103 (see Table A-2 and FIG. 27), in which the amino acid residues that form the framework regions are disregarded. Such amino acid sequences of the invention can be as further described herein.

[1109] Some preferred, but non-limiting examples of IL-12Rb1 sequences are the amino acid sequences of SEQ ID NO's: 2077; 2078; 2079; 2080; 2081; 2082; 2083; 2084; 2085; 2086; 2087; 2088; 2089; 2090; 2091; 2092; 2093; 2094; 2095; 2096; 2097; 2098; 2099; 2100; 2101; 2102 and/or 2103 (see Table A-2 and FIG. 27). Thus, according to another preferred, but non-limiting aspect of the invention, an IL-12Rb1 sequence is an amino acid sequence that is directed against (as defined herein) IL-12Rb1 and that either:
[1110] a) has at least 70% amino acid identity, preferably at least 80% amino acid identity, more preferably at least 90% amino acid identity, such as 95% amino acid identity or more or even essentially 100% amino acid identity with at least one of the amino acid sequences of SEQ ID NO's: 2077; 2078; 2079; 2080; 2081; 2082; 2083; 2084; 2085; 2086; 2087; 2088; 2089; 2090; 2091; 2092; 2093; 2094; 2095; 2096; 2097; 2098; 2099; 2100; 2101; 2102 and/or 2103 (see Table A-2 and FIG. 27);
   [1111] and/or that
[1112] b) has no more than 20, preferably no more than 10, such as 9, 8, 7, 6, 5, 4, 3, 2 or only one amino acid difference with at least one of the amino acid sequences of SEQ ID NO's: 2077; 2078; 2079; 2080; 2081; 2082; 2083; 2084; 2085; 2086; 2087; 2088; 2089; 2090; 2091; 2092; 2093; 2094; 2095; 2096; 2097; 2098; 2099; 2100; 2101; 2102 and/or 2103 (see Table A-2 and FIG. 27). Preferably, such an amino acid sequence has no more than a total of 5 (such as 4, 3. 2 or only one) such amino acid differences in the CDR's and/or no more than a total of 5 (such as 4, 3. 2 or only 1) such amino acid differences in the framework sequences;
   [1113] and/or that
[1114] c) is either (i) capable of cross-blocking (as defined herein) the interaction of at least one of the amino acid sequences of SEQ ID NO's: 2077; 2078; 2079; 2080; 2081; 2082; 2083; 2084; 2085; 2086; 2087; 2088; 2089; 2090; 2091; 2092; 2093; 2094; 2095; 2096; 2097; 2098; 2099; 2100; 2101; 2102 and/or 2103 with the IL-12Rb1 subunit and/or (ii) being able to compete with (i.e. is a competitor for) the binding of at least one of the amino acid sequences of SEQ ID NO's: 2077; 2078; 2079; 2080; 2081; 2082; 2083; 2084; 2085; 2086; 2087; 2088; 2089; 2090; 2091; 2092; 2093; 2094; 2095; 2096; 2097; 2098; 2099; 2100; 2101; 2102 and/or 2103 (see Table A-2 and FIG. 27) to IL-12Rb1.

[1115] In another preferred, but non-limiting aspect, an IL-12Rb1 sequence is chosen from one of the amino acid sequences of SEQ ID NO's: 2077; 2078; 2079; 2080; 2081; 2082; 2083; 2084; 2085; 2086; 2087; 2088; 2089; 2090; 2091; 2092; 2093; 2094; 2095; 2096; 2097; 2098; 2099; 2100; 2101; 2102 and/or 2103 (see Table A-2 and FIG. 27).

[1116] H) IL-12Rb2 Sequences.

[1117] One specific, but non-limiting aspect relates to “IL-12Rb2 sequences”, which generally are defined herein as amino acid sequences of the invention that are directed against (as defined herein) the IL-12Rb2 subunit, for example as present in the receptor for 1L-12 (and thereby against the receptor for IL-12).

[1118] IL-12Rb2 sequences may generally be as further described herein (for example, in terms of affinity, specificity etc. for IL-12Rb2) for amino acid sequences of the invention in general. Also, as described herein for the amino acid sequences of the invention, the IL-12Rb2 sequences are preferably such that they form or are capable of forming (optionally after suitable folding) a single antigen binding domain or antigen binding unit, and may for example be amino acid sequences that comprise an immunoglobulin fold, amino acid sequences that are comprised of four framework regions and three CDR's, and may in particular be domain antibodies, single domain antibodies, VHH's, “dAb's” or Nanobodies (all as further described herein), or suitable fragments thereof.

[1119] In one particular aspect, an IL-12Rb2 sequence may comprise one or more stretches of amino acid residues chosen from the group consisting of:
[1120] a) the amino acid sequences from the “CDR1 Sequences Group 51” (as defined and listed in Table A-I; see also FIG. 18);
[1121] b) amino acid sequences that have at least 80% amino acid identity with at least one of the amino acid sequences from the “CDR1 Sequences Group 51”;
[1122] c) amino acid sequences that have 3, 2, or 1 amino acid difference with at least one of the amino acid sequences from the “CDR1 Sequences Group 51”;
[1123] d) the amino acid sequences from the “CDR2 Sequences Group 53” (as defined and listed in Table A-1; see also FIG. 18);
[1124] e) amino acid sequences that have at least 80% amino acid identity with at least one of the amino acid sequences from the “CDR2 Sequences Group 53”;
[1125] f) amino acid sequences that have 3, 2, or 1 amino acid difference with at least one of the amino acid sequences from the “CDR2 Sequences Group 53”;
[1126] g) the amino acid sequences from the “CDR3 Sequences Group 55” (as defined and listed in Table A-1; see also FIG. 18);
[1127] h) amino acid sequences that have at least 80% amino acid identity with at least one of the amino acid sequences from the “CDR3 Sequences Group 55”;
[1128] i) amino acid sequences that have 3, 2, or 1 amino acid difference with at least one of the amino acid sequences from the “CDR3 Sequences Group 55”;
   [1129] or any suitable combination thereof.

[1130] Optionally, when an amino acid sequence of the invention contains one or more amino acid sequences according to b) and/or c), Optional Condition I, Optional Condition II and/or Optional Condition III (all as defined herein) may apply to said amino acid sequence (i.e. compared to the original amino acid sequence according to a)). Also, optionally, when an amino acid sequence of the invention contains one or more amino acid sequences according to e) and/or f), Optional Condition I, Optional Condition II and/or Optional Condition III (all as defined herein) may apply to said amino acid sequence (i.e. compared to the original amino acid sequence according to d)). Also, optionally, when an amino acid sequence of the invention contains one or more amino acid sequences according to h) and/or i), Optional Condition I, Optional Condition II and/or Optional Condition III (all as defined herein) may apply to said amino acid sequence (i.e. compared to the original amino acid sequence according to g)).

[1131] In this specific aspect, the amino acid sequence preferably comprises one or more stretches of amino acid residues chosen from the group consisting of:
[1132] a) the amino acid sequences from the “CDR1 Sequences Group 51”;
[1133] b) the amino acid sequences from the “CDR2 Sequences Group 53”; and
[1134] c) the amino acid sequences from the “CDR3 Sequences Group 55”;
   [1135] or any suitable combination thereof.

[1136] Also, preferably, in such an amino acid sequence, at least one of said stretches of amino acid residues forms part of the antigen binding site for binding against IL-12Rb2.

[1137] In a more specific, but again non-limiting aspect, an IL-12Rb2 sequence may comprise two or more stretches of amino acid residues chosen from the group consisting of:
[1138] a) the amino acid sequences from the “CDR1 Sequences Group 51”;
[1139] b) amino acid sequences that have at least 80% amino acid identity with at least one of the amino acid sequences from the “CDR1 Sequences Group 51”;
[1140] c) amino acid sequences that have 3, 2, or 1 amino acid difference with at least one of the amino acid sequences from the “CDR1 Sequences Group 51”;
[1141] d) the amino acid sequences from the “CDR2 Sequences Group 53”;
[1142] e) amino acid sequences that have at least 80% amino acid identity with at least one of the amino acid sequences from the “CDR2 Sequences Group 53”;
[1143] f) amino acid sequences that have 3, 2, or 1 amino acid difference with at least one of the amino acid sequences from the “CDR2 Sequences Group 53”;
[1144] g) the amino acid sequences from the “CDR3 Sequences Group 55”;
[1145] h) amino acid sequences that have at least 80% amino acid identity with at least one of the amino acid sequences from the “CDR3 Sequences Group 55”;
[1146] i) amino acid sequences that have 3, 2, or 1 amino acid difference with at least one of the amino acid sequences from the “CDR3 Sequences Group 55”;
   [1147] such that (i) when the first stretch of amino acid residues corresponds to one of the amino acid sequences according to a), b) or c), the second stretch of amino acid residues corresponds to one of the amino acid sequences according to d), e), f), g), h) or i); (ii) when the first stretch of amino acid residues corresponds to one of the amino acid sequences according to d), e) or f), the second stretch of amino acid residues corresponds to one of the amino acid sequences according to a), b), c), g), h) or i); or (iii) when the first stretch of amino acid residues corresponds to one of the amino acid sequences according to g), h) or i), the second stretch of amino acid residues corresponds to one of the amino acid sequences according to a), b), c), d), e) or f).

[1148] In this specific aspect, the amino acid sequence preferably comprises two or more stretches of amino acid residues chosen from the group consisting of:
[1149] a) the amino acid sequences from the “CDR1 Sequences Group 51”;
[1150] b) the amino acid sequences from the “CDR2 Sequences Group 53”; and
[1151] c) the amino acid sequences from the “CDR3 Sequences Group 55”;
   [1152] such that, (i) when the first stretch of amino acid residues corresponds to one of the amino acid sequences from the “CDR1 Sequences Group 51”, the second stretch of amino acid residues corresponds to one of the amino acid sequences from the “CDR2 Sequences Group 53” or from the “CDR3 Sequences Group 55”; (ii) when the first stretch of amino acid residues corresponds to one of the amino acid sequences from the “CDR2 Sequences Group 53”, the second stretch of amino acid residues corresponds to one of the amino acid sequences from the “CDR1 Sequences Group 51” or from the “CDR3 Sequences Group 55”; or (iii) when the first stretch of amino acid residues corresponds to one of the amino acid sequences from the “CDR3 Sequences Group 55”, the second stretch of amino acid residues corresponds to one of the amino acid sequences from the “CDR1 Sequences Group 51” or from the “CDR2 Sequences Group 53”.

[1153] Also, in such an amino acid sequence, the at least two stretches of amino acid residues again preferably form part of the antigen binding site for binding against IL-12Rb2.

[1154] In an even more specific, but non-limiting aspect, an 11-12Rb2 sequence may comprise three or more stretches of amino acid residues, in which the first stretch of amino acid residues is chosen from the group consisting of:
[1155] a) the amino acid sequences from the “CDR1 Sequences Group 51”;
[1156] b) amino acid sequences that have at least 80% amino acid identity with at least one of the amino acid sequences from the “CDR1 Sequences Group 51”;
[1157] c) amino acid sequences that have 3, 2, or 1 amino acid difference with at least one of the amino acid sequences from the “CDR1 Sequences Group 51”;
   [1158] the second stretch of amino acid residues is chosen from the group consisting of:
[1159] d) the amino acid sequences from the “CDR2 Sequences Group 53”;
[1160] e) amino acid sequences that have at least 80% amino acid identity with at least one of the amino acid sequences from the “CDR2 Sequences Group 53”;
[1161] f) amino acid sequences that have 3, 2, or 1 amino acid difference with at least one of the amino acid sequences from the “CDR2 Sequences Group 53”;
   [1162] and the third stretch of amino acid residues is chosen from the group consisting of:
[1163] g) the amino acid sequences from the “CDR3 Sequences Group 55”;
[1164] h) amino acid sequences that have at least 80% amino acid identity with at least one of the amino acid sequences from the “CDR3 Sequences Group 55”;
[1165] i) amino acid sequences that have 3, 2, or 1 amino acid difference with at least one of the amino acid sequences from the “CDR3 Sequences Group 55”.

[1166] Preferably, in this specific aspect, the first stretch of amino acid residues is chosen from the group consisting of the amino acid sequences from the “CDR1 Sequences Group 51”; the second stretch of amino acid residues is chosen from the group consisting of the amino acid sequences from the “CDR2 Sequences Group 53”; and the third stretch of amino acid residues is chosen from the group consisting of the amino acid sequences from the “CDR3 Sequences Group 55”.

[1167] Again, preferably, in such an amino acid sequence, the at least three stretches of amino acid residues forms part of the antigen binding site for binding against IL-12Rb2.

[1168] Preferred combinations of such stretches of amino acid sequences will become clear from the further disclosure herein.

[1169] Preferably, in such amino acid sequences the CDR sequences have at least 70% amino acid identity, preferably at least 80% amino acid identity, more preferably at least 90% amino acid identity, such as 95% amino acid identity or more or even essentially 100% amino acid identity with the CDR sequences of at least one of the IL-12Rb2 sequences listed in Table A-2 and FIG. 28. This degree of amino acid identity can for example be determined by determining the degree of amino acid identity (in a manner described herein) between said amino acid sequence and one or more of the sequences of SEQ ID NO's: 2104; 2105; 2106; 2107; 2108; 2109; 2110; 2111; 2112; 2113; 2114; 2115; 2116; 2117; 2118; 2119; 2120; 2121; 2122; 2123 and/or 2124 (see Table A-2 and FIG. 28), in which the amino acid residues that form the framework regions are disregarded. Also, such amino acid sequences of the invention can be as further described herein.

[1170] Also, such amino acid sequences are preferably such that they can specifically bind (as defined herein) to the IL-12Rb2 subunit (i.e. as present in the receptor for IL-12); and more in particular bind to the IL-12Rb2 subunit with an affinity (suitably measured and/or expressed as a K_{D}-value (actual or apparent), a K_{A}-value (actual or apparent), a kₒₙ-rate and/or a k_{off}-rate, or alternatively as an IC₅₀ value (all as further) described herein) that is as defined herein.

[1171] When the amino acid sequence of the invention essentially consists of 4 framework regions (FR1 to FR4, respectively) and 3 complementarity determining regions (CDR1 to CDR3, respectively), the amino acid sequence of the invention is preferably such that:
[1172] CDR1 is chosen from the group consisting of:
[1173] a) the amino acid sequences from the “CDR1 Sequences Group 51”;
[1174] b) amino acid sequences that have at least 80% amino acid identity with at least one of the amino acid sequences from the “CDR1 Sequences Group 51”;
[1175] c) amino acid sequences that have 3, 2, or 1 amino acid difference with at least one of the amino acid sequences from the “CDR1 Sequences Group 51”;
   [1176] and/or
   [1177] CDR2 is chosen from the group consisting of:
[1178] d) the amino acid sequences from the “CDR2 Sequences Group 53”;
[1179] e) amino acid sequences that have at least 80% amino acid identity with at least one of the amino acid sequences from the “CDR2 Sequences Group 53”;
[1180] f) amino acid sequences that have 3, 2, or 1 amino acid difference with at least one of the amino acid sequences from the “CDR2 Sequences Group 53”;
   [1181] and/or
   [1182] CDR3 is chosen from the group consisting of:
[1183] g) the amino acid sequences from the “CDR3 Sequences Group 55”;
[1184] h) amino acid sequences that have at least 80% amino acid identity with at least one of the amino acid sequences from the “CDR3 Sequences Group 55”;
[1185] i) amino acid sequences that have 3, 2, or 1 amino acid difference with at least one of the amino acid sequences from the “CDR3 Sequences Group 55”.

[1186] In particular, such an amino acid sequence of the invention may be such that CDR1 is chosen from the group consisting of the amino acid sequences from the “CDR1 Sequences Group 51”; and/or CDR2 is chosen from the group consisting of the amino acid sequences from the “CDR2 Sequences Group 53”; and/or CDR3 is chosen from the group consisting of the amino acid sequences from the “CDR3 Sequences Group 55”.

[1187] In particular, when the amino acid sequence of the invention essentially consists of 4 framework regions (FR1 to FR4, respectively) and 3 complementarity determining regions (CDR1 to CDR3, respectively), the amino acid sequence of the invention is preferably such that:
[1188] CDR1 is chosen from the group consisting of:
[1189] a) the amino acid sequences from the “CDR1 Sequences Group 51”;
[1190] b) amino acid sequences that have at least 80% amino acid identity with at least one of the amino acid sequences from the “CDR1 Sequences Group 51”;
[1191] c) amino acid sequences that have 3, 2, or 1 amino acid difference with at least one of the amino acid sequences from the “CDR1 Sequences Group 51”;
   [1192] and
   [1193] CDR2 is chosen from the group consisting of:
[1194] d) the amino acid sequences from the “CDR2 Sequences Group 53”;
[1195] e) amino acid sequences that have at least 80% amino acid identity with at least one of the amino acid sequences from the “CDR2 Sequences Group 53”;
[1196] f) amino acid sequences that have 3, 2, or 1 amino acid difference with at least one of the amino acid sequences from the “CDR2 Sequences Group 53”;
   [1197] and
   [1198] CDR3 is chosen from the group consisting of:
[1199] g) the amino acid sequences from the “CDR3 Sequences Group 55”;
[1200] h) amino acid sequences that have at least 80% amino acid identity with at least one of the amino acid sequences from the “CDR3 Sequences Group 55”;
[1201] i) amino acid sequences that have 3, 2, or 1 amino acid difference with at least one of the amino acid sequences from the “CDR3 Sequences Group 55”; or any suitable fragment of such an amino acid sequence

[1202] In particular, such an amino acid sequence of the invention may be such that CDR1 is chosen from the group consisting of the amino acid sequences from the “CDR1 Sequences Group 51”; and CDR2 is chosen from the group consisting of the amino acid sequences from the “CDR2 Sequences Group 53”; and CDR3 is chosen from the group consisting of the amino acid sequences from the “CDR3 Sequences Group 55”.

[1203] Again, preferred combinations of CDR sequences will become clear from the further description herein.

[1204] Also, such amino acid sequences are preferably such that they can specifically bind (as defined herein) to IL-12Rb2; and more in particular bind to IL-12Rb2 with an affinity (suitably measured and/or expressed as a K_{D}-value (actual or apparent), a K_{A}-value (actual or apparent), a kₒₙ-rate and/or a k_{off}-rate, or alternatively as an IC₅₀ value (all as further) described herein) that is as defined herein.

[1205] In one preferred, but non-limiting aspect, the invention relates to an amino acid sequence that essentially consists of 4 framework regions (FR1 to FR4, respectively) and 3 complementarity determining regions (CDR1 to CDR3, respectively), in which the CDR sequences of said amino acid sequence have at least 70% amino acid identity, preferably at least 80% amino acid identity, more preferably at least 90% amino acid identity, such as 95% amino acid identity or more or even essentially 100% amino acid identity with the CDR sequences of at least one of the amino acid sequences of SEQ ID NO's: 2104; 2105; 2106; 2107; 2108; 2109; 2110; 2111; 2112; 2113; 2114; 2115; 2116; 2117; 2118; 2119; 2120; 2121; 2122; 2123 and/or 2124 (see Table A-2 and FIG. 28). This degree of amino acid identity can for example be determined by determining the degree of amino acid identity (in a manner described herein) between said amino acid sequence and one or more of the sequences of SEQ ID NO's: 2104; 2105; 2106; 2107; 2108; 2109; 2110; 2111; 2112; 2113; 2114; 2115; 2116; 2117; 2118; 2119; 2120; 2121; 2122; 2123 and/or 2124 (see Table A-2 and FIG. 28), in which the amino acid residues that form the framework regions are disregarded. Such amino acid sequences of the invention can be as further described herein.

[1206] Some preferred, but non-limiting examples of IL-12Rb2 sequences are the amino acid sequences of SEQ ID NO's: 2104; 2105; 2106; 2107; 2108; 2109; 2110; 2111; 2112; 2113; 2114; 2115; 2116; 2117; 2118; 2119; 2120; 2121; 2122; 2123 and/or 2124 (see Table A-2 and FIG. 28). Thus, according to another preferred, but non-limiting aspect of the invention, an IL-12Rb2 sequence is an amino acid sequence that is directed against (as defined herein) IL-12Rb2 and that either:
[1207] a) has at least 70% amino acid identity, preferably at least 80% amino acid identity, more preferably at least 90% amino acid identity, such as 95% amino acid identity or more or even essentially 100% amino acid identity with at least one of the amino acid sequences of SEQ ID NO's: 2104; 2105; 2106; 2107; 2108; 2109; 2110; 2111; 2112; 2113; 2114; 2115; 2116; 2117; 2118; 2119; 2120; 2121; 2122; 2123 and/or 2124 (see Table A-2 and FIG. 28);
   [1208] and/or that
[1209] b) has no more than 20, preferably no more than 10, such as 9, 8, 7, 6, 5, 4, 3, 2 or only one amino acid difference with at least one of the amino acid sequences of SEQ ID NO's: 2104; 2105; 2106; 2107; 2108; 2109; 2110; 2111; 2112; 2113; 2114; 2115; 2116; 2117; 2118; 2119; 2120; 2121; 2122; 2123 and/or 2124 (see Table A-2 and FIG. 28). Preferably, such an amino acid sequence has no more than a total of 5 (such as 4, 3, 2 or only one) such amino acid differences in the CDR's and/or no more than a total of 5 (such as 4, 3. 2 or only 1) such amino acid differences in the framework sequences;
   [1210] and/or that
[1211] c) is either (i) capable of cross-blocking (as defined herein) the interaction of at least one of the amino acid sequences of SEQ ID NO's: 2104; 2105; 2106; 2107; 2108; 2109; 2110; 2111; 2112; 2113; 2114; 2115; 2116; 2117; 2118; 2119; 2120; 2121; 2122; 2123 and/or 2124 with the IL-12Rb2 subunit and/or (ii) being able to compete with (i.e. is a competitor for) the binding of at least one of the amino acid sequences of SEQ ID NO's: 2104; 2105; 2106; 2107; 2108; 2109; 2110; 2111; 2112; 2113; 2114; 2115; 2116; 2117; 2118; 2119; 2120; 2121; 2122; 2123 and/or 2124 (see Table A-2 and FIG. 28) to IL-12Rb2.

[1212] In another preferred, but non-limiting aspect, an IL-12Rb2 sequence is chosen from one of the amino acid sequences of SEQ ID NO's: 2104; 2105; 2106; 2107; 2108; 2109; 2110; 2111; 2112; 2113; 2114; 2115; 2116; 2117; 2118; 2119; 2120; 2121; 2122; 2123 and/or 2124 (see Table A-2 and FIG. 28).

[1213] I) IL-23R Sequences.

[1214] One specific, but non-limiting aspect relates to “IL-23R sequences”, which generally are defined herein as amino acid sequences of the invention that are directed against (as defined herein) the IL-23R subunit, for example as present in the (cognate) receptor for IL-23 (and thereby against the receptor for IL-23).

[1215] IL-23R sequences may generally be as further described herein (for example, in terms of affinity, specificity etc. for IL-23R) for amino acid sequences of the invention in general. Also, as described herein for the amino acid sequences of the invention, the IL-23R sequences are preferably such that they form or are capable of forming (optionally after suitable folding) a single antigen binding domain or antigen binding unit, and may for example be amino acid sequences that comprise an immunoglobulin fold, amino acid sequences that are comprised of four framework regions and three CDR's, and may in particular be domain antibodies, single domain antibodies, VHH's, “dAb's” or Nanobodies (all as further described herein), or suitable fragments thereof.

[1216] In one particular aspect, an IL-23R sequence may comprise one or more stretches of amino acid residues chosen from the group consisting of:
[1217] a) the amino acid sequences from the “CDR1 Sequences Group 58” (as defined and listed in Table A-1; see also FIG. 19);
[1218] b) amino acid sequences that have at least 80% amino acid identity with at least one of the amino acid sequences from the “CDR1 Sequences Group 58”;
[1219] c) amino acid sequences that have 3, 2, or 1 amino acid difference with at least one of the amino acid sequences from the “CDR1 Sequences Group 58”;
[1220] d) the amino acid sequences from the “CDR2 Sequences Group 60” (as defined and listed in Table A-1; see also FIG. 19);
[1221] e) amino acid sequences that have at least 80% amino acid identity with at least one of the amino acid sequences from the “CDR2 Sequences Group 60”;
[1222] f) amino acid sequences that have 3, 2, or 1 amino acid difference with at least one of the amino acid sequences from the “CDR2 Sequences Group 60”;
[1223] g) the amino acid sequences from the “CDR3 Sequences Group 62” (as defined and listed in Table A-1; see also FIG. 19);
[1224] h) amino acid sequences that have at least 80% amino acid identity with at least one of the amino acid sequences from the “CDR3 Sequences Group 62”;
[1225] i) amino acid sequences that have 3, 2, or 1 amino acid difference with at least one of the amino acid sequences from the “CDR3 Sequences Group 62”;
   [1226] or any suitable combination thereof.

[1227] Optionally, when an amino acid sequence of the invention contains one or more amino acid sequences according to b) and/or c), Optional Condition I, Optional Condition II and/or Optional Condition III (all as defined herein) may apply to said amino acid sequence (i.e. compared to the original amino acid sequence according to a)). Also, optionally,.when an amino acid sequence of the invention contains one or more amino acid sequences according to e) and/or f), Optional Condition I, Optional Condition II and/or Optional Condition III (all as defined herein) may apply to said amino acid sequence (i.e. compared to the original amino acid sequence according to d)). Also, optionally, when an amino acid sequence of the invention contains one or more amino acid sequences according to h) and/or i), Optional Condition I, Optional Condition II and/or Optional Condition III (all as defined herein) may apply to said amino acid sequence (i.e. compared to the original amino acid sequence according to g)).

[1228] In this specific aspect, the amino acid sequence preferably comprises one or more stretches of amino acid residues chosen from the group consisting of:
[1229] a) the amino acid sequences from the “CDR1 Sequences Group 58”;
[1230] b) the amino acid sequences from the “CDR2 Sequences Group 60”; and
[1231] c) the amino acid sequences from the “CDR3 Sequences Group 62”;
   [1232] or any suitable combination thereof.

[1233] Also, preferably, in such an amino acid sequence, at least one of said stretches of amino acid residues forms part of the antigen binding site for binding against IL-23R.

[1234] In a more specific, but again non-limiting aspect, an IL-23R sequence may comprise two or more stretches of amino acid residues chosen from the group consisting of
[1235] a) the amino acid sequences from the “CDR1 Sequences Group 58”;
[1236] b) amino acid sequences that have at least 80% amino acid identity with at least one of the amino acid sequences from the “CDR1 Sequences Group 58”;
[1237] c) amino acid sequences that have 3, 2, or 1 amino acid difference with at least one of the amino acid sequences from the “CDR1 Sequences Group 58”;
[1238] d) the amino acid sequences from the “CDR2 Sequences Group 60”;
[1239] e) amino acid sequences that have at least 80% amino acid identity with at least one of the amino acid sequences from the “CDR2 Sequences Group 60”;
[1240] f) amino acid sequences that have 3, 2, or 1 amino acid difference with at least one of the amino acid sequences from the “CDR2 Sequences Group 60”;
[1241] g) the amino acid sequences from the “CDR3 Sequences Group 62”;
[1242] h) amino acid sequences that have at least 80% amino acid identity with at least one of the amino acid sequences from the “CDR3 Sequences Group 62”;
[1243] i) amino acid sequences that have 3, 2, or 1 amino acid difference with at least one of the amino acid sequences from the “CDR3 Sequences Group 62”;

[1244] such that (i) when the first stretch of amino acid residues corresponds to one of the amino acid sequences according to a), b) or c), the second stretch of amino acid residues corresponds to one of the amino acid sequences according to d), e), f), g), h) or i); (ii) when the first stretch of amino acid residues corresponds to one of the amino acid sequences according to d), e) or f), the second stretch of amino acid residues corresponds to one of the amino acid sequences according to a), b), c), g), h) or i); or (iii) when the first stretch of amino acid residues corresponds to one of the amino acid sequences according to g), h) or i), the second stretch of amino acid residues corresponds to one of the amino acid sequences according to a), b), c), d), e) or f).

[1245] In this specific aspect, the amino acid sequence preferably comprises two or more stretches of amino acid residues chosen from the group consisting of:
[1246] a) the amino acid sequences from the “CDR1 Sequences Group 58”;
[1247] b) the amino acid sequences from the “CDR2 Sequences Group 60”; and
[1248] c) the amino acid sequences from the “CDR3 Sequences Group 62”;

[1249] such that, (i) when the first stretch of amino acid residues corresponds to one of the amino acid sequences from the “CDR1 Sequences Group 58”, the second stretch of amino acid residues corresponds to one of the amino acid sequences from the “CDR2 Sequences Group 60” or from the “CDR3 Sequences Group 62”; (ii) when the first stretch of amino acid residues corresponds to one of the amino acid sequences from the “CDR2 Sequences Group 60”, the second stretch of amino acid residues corresponds to one of the amino acid sequences from the “CDR1 Sequences Group 58” or from the “CDR3 Sequences Group 62”; or (iii) when the first stretch of amino acid residues corresponds to one of the amino acid sequences from the “CDR3 Sequences Group 62”, the second stretch of amino acid residues corresponds to one of the amino acid sequences from the “CDR1 Sequences Group 58” or from the “CDR2 Sequences Group 60”.

[1250] Also, in such an amino acid sequence, the at least two stretches of amino acid residues again preferably form part of the antigen binding site for binding against IL-23R.

[1251] In an even more specific, but non-limiting aspect, an IL-23R sequence may comprise three or more stretches of amino acid residues, in which the first stretch of amino acid residues is chosen from the group consisting of:
[1252] a) the amino acid sequences from the “CDR1 Sequences Group 58”;
[1253] b) amino acid sequences that have at least 80% amino acid identity with at least one of the amino acid sequences from the “CDR1 Sequences Group 58”;
[1254] c) amino acid sequences that have 3, 2, or 1 amino acid difference with at least one of the amino acid sequences from the “CDR1 Sequences Group 58”;
   [1255] the second stretch of amino acid residues is chosen from the group consisting of:
[1256] d) the amino acid sequences from the “CDR2 Sequences Group 60”;
[1257] e) amino acid sequences that have at least 80% amino acid identity with at least one of the amino acid sequences from the “CDR2 Sequences Group 60”;
[1258] f) amino acid sequences that have 3, 2, or 1 amino acid difference with at least one of the amino acid sequences from the “CDR2 Sequences Group 60”;
   [1259] and the third stretch of amino acid residues is chosen from the group consisting of:
[1260] g) the amino acid sequences from the “CDR3 Sequences Group 62”;
[1261] h) amino acid sequences that have at least 80% amino acid identity with at least one of the amino acid sequences from the “CDR3 Sequences Group 62”;
[1262] i) amino acid sequences that have 3, 2, or 1 amino acid difference with at least one of the amino acid sequences from the “CDR3 Sequences Group 62”.

[1263] Preferably, in this specific aspect, the first stretch of amino acid residues is chosen from the group consisting of the amino acid sequences from the “CDR1 Sequences Group 58”; the second stretch of amino acid residues is chosen from the group consisting of the amino acid sequences from the “CDR2 Sequences Group 60”; and the third stretch of amino acid residues is chosen from the group consisting of the amino acid sequences from the “CDR3 Sequences Group 62”.

[1264] Again, preferably, in such an amino acid sequence, the at least three stretches of amino acid residues forms part of the antigen binding site for binding against IL-23R.

[1265] Preferred combinations of such stretches of amino acid sequences will become clear from the further disclosure herein.

[1266] Preferably, in such amino acid sequences the CDR sequences have at least 70% amino acid identity, preferably at least 80% amino acid identity, more preferably at least 90% amino acid identity, such as 95% amino acid identity or more or even essentially 100% amino acid identity with the CDR sequences of at least one of the IL-23R sequences listed in Table A-2 and FIG. 29. This degree of amino acid identity can for example be determined by determining the degree of amino acid identity (in a manner described herein) between said amino acid sequence and one or more of the sequences of SEQ ID NO's: 2125; 2126; 2127; 2128; 2129; 2130; 2131; 2132; 2133; 2134; 2135; 2136; 2137; 2138; 2139; 2140 and/or 2141 (see Table A-2 and FIG. 29), in which the amino acid residues that form the framework regions are disregarded. Also, such amino acid sequences of the invention can be as further described herein.

[1267] Also, such amino acid sequences are preferably such that they can specifically bind (as defined herein) to the IL-23R subunit (i.e. as present in the receptor for IL-23); and more in particular bind to the IL-23R subunit with an affinity (suitably measured and/or expressed as a K_{D}-value (actual or apparent), a K_{A}-value (actual or apparent), a kₒₙrate and/or a k_{off}-rate, or alternatively as an IC₅₀ value (all as further) described herein) that is as defined herein.

[1268] When the amino acid sequence of the invention essentially consists of 4 framework regions (FR1 to FR4, respectively) and 3 complementarity determining regions (CDR1 to CDR3, respectively), the amino acid sequence of the invention is preferably such that:
[1269] CDR1 is chosen from the group consisting of:
[1270] a) the amino acid sequences from the “CDR1 Sequences Group 58”;
[1271] b) amino acid sequences that have at least 80% amino acid identity with at least one of the amino acid sequences from the “CDR1 Sequences Group 58”;
[1272] c) amino acid sequences that have 3, 2, or 1 amino acid difference with at least one of the amino acid sequences from the “CDR1 Sequences Group 58”;
   [1273] and/or
   [1274] CDR2 is chosen from the group consisting of:
[1275] d) the amino acid sequences from the “CDR2 Sequences Group 60”;
[1276] e) amino acid sequences that have at least 80% amino acid identity with at least one of the amino acid sequences from the “CDR2 Sequences Group 60”;
[1277] f) amino acid sequences that have 3, 2, or 1 amino acid difference with at least one of the amino acid sequences from the “CDR2 Sequences Group 60”;
   [1278] and/or
   [1279] CDR3 is chosen from the group consisting of:
[1280] g) the amino acid sequences from the “CDR3 Sequences Group 62”;
[1281] h) amino acid sequences that have at least 80% amino acid identity with at least one of the amino acid sequences from the “CDR3 Sequences Group 62”;
[1282] i) amino acid sequences that have 3, 2, or 1 amino acid difference with at least one of the amino acid sequences from the “CDR3 Sequences Group 62”.

[1283] In particular, such an amino acid sequence of the invention may be such that CDR1 is chosen from the group consisting of the amino acid sequences from the “CDR1 Sequences Group 58”; and/or CDR2 is chosen from the group consisting of the amino acid sequences from the “CDR2 Sequences Group 60”; and/or CDR3 is chosen from the group consisting of the amino acid sequences from the “CDR3 Sequences Group 62”.

[1284] In particular, when the amino acid sequence of the invention essentially consists of 4 framework regions (FR1 to FR4, respectively) and 3 complementarity determining regions (CDR1 to CDR3, respectively), the amino acid sequence of the invention is preferably such that:
[1285] CDR1 is chosen from the group consisting of:
[1286] a) the amino acid sequences from the “CDR1 Sequences Group 58”;
[1287] b) amino acid sequences that have at least 80% amino acid identity with at least one of the amino acid sequences from the “CDR1 Sequences Group 58”;
[1288] c) amino acid sequences that have 3, 2, or 1 amino acid difference with at least one of the amino acid sequences from the “CDR1 Sequences Group 58”;
   [1289] and
   [1290] CDR2 is chosen from the group consisting of:
[1291] d) the amino acid sequences from the “CDR2 Sequences Group 60”;
[1292] e) amino acid sequences that have at least 80% amino acid identity with at least one of the amino acid sequences from the “CDR2 Sequences Group 60”;
[1293] f) amino acid sequences that have 3, 2, or 1 amino acid difference with at least one of the amino acid sequences from the “CDR2 Sequences Group 60”;
   [1294] and
   [1295] CDR3 is chosen from the group consisting of:
[1296] g) the amino acid sequences from the “CDR3 Sequences Group 62”;
[1297] h) amino acid sequences that have at least 80% amino acid identity with at least one of the amino acid sequences from the “CDR3 Sequences Group 62”;
[1298] i) amino acid sequences that have 3, 2, or 1 amino acid difference with at least one of the amino acid sequences from the “CDR3 Sequences Group 62”; or any suitable fragment of such an amino acid sequence

[1299] In particular, such an amino acid sequence of the invention may be such that CDR1 is chosen from the group consisting of the amino acid sequences from the “CDR1 Sequences Group 58”; and CDR2 is chosen from the group consisting of the amino acid sequences from the “CDR2 Sequences Group 60”; and CDR3 is chosen from the group consisting of the amino acid sequences from the “CDR3 Sequences Group 62”.

[1300] Again, preferred combinations of CDR sequences will become clear from the further description herein.

[1301] Also, such amino acid sequences are preferably such that they can specifically bind (as defined herein) to IL-23R; and more in particular bind to IL-23R with an affinity (suitably measured and/or expressed as a K_{D}-value (actual or apparent), a K_{A}-value (actual or apparent), a kₒₙ-rate and/or a k_{off}-rate, or alternatively as an IC₅₀ value (all as further) described herein) that is as defined herein.

[1302] In one preferred, but non-limiting aspect, the invention relates to an amino acid sequence that essentially consists of 4 framework regions (FR1 to FR4, respectively) and 3 complementarity determining regions (CDR1 to CDR3, respectively), in which the CDR sequences of said amino acid sequence have at least 70% amino acid identity, preferably at least 80% amino acid identity, more preferably at least 90% amino acid identity, such as 95% amino acid identity or more or even essentially 100% amino acid identity with the CDR sequences of at least one of the amino acid sequences of SEQ ID NO's: 2125; 2126; 2127; 2128; 2129; 2130; 2131; 2132; 2133; 2134; 2135; 2136; 2137; 2138; 2139; 2140 and/or 2141 (see Table A-2 and FIG. 29). This degree of amino acid identity can for example be determined by determining the degree of amino acid identity (in a manner described herein) between said amino acid sequence and one or more of the sequences of SEQ ID NO's: 2125; 2126; 2127; 2128; 2129; 2130; 2131; 2132; 2133; 2134; 2135; 2136; 2137; 2138; 2139; 2140 and/or 2141 (see Table A-2 and FIG. 29), in which the amino acid residues that form the framework regions are disregarded. Such amino acid sequences of the invention can be as further described herein.

[1303] Some preferred, but non-limiting examples of IL-23R sequences are the amino acid sequences of SEQ ID NO's: 2125; 2126; 2127; 2128; 2129; 2130; 2131; 2132; 2133; 2134; 2135; 2136; 2137; 2138; 2139; 2140 and/or 2141 (see Table A-2 and FIG. 29). Thus, according to another preferred, but non-limiting aspect of the invention, an IL-23R sequence is an amino acid sequence that is directed against (as defined herein) IL-23R, and that either:
[1304] a) has at least 70% amino acid identity, preferably at least 80% amino acid identity, more preferably at least 90% amino acid identity, such as 95% amino acid identity or more or even essentially 100% amino acid identity with at least one of the amino acid sequences of SEQ ID NO's: 2125; 2126; 2127; 2128; 2129; 2130; 2131; 2132; 2133; 2134; 2135; 2136; 2137; 2138; 2139; 2140 and/or 2141 (see Table A-2 and FIG. 29);
   [1305] and/or that
[1306] b) has no more than 20, preferably no more than 10, such as 9, 8, 7, 6, 5, 4, 3, 2 or only one amino acid difference with at least one of the amino acid sequences of SEQ ID NO's: 2125; 2126; 2127; 2128; 2129; 2130; 2131; 2132; 2133; 2134; 2135; 2136; 2137; 2138; 2139; 2140 and/or 2141 (see Table A-2 and FIG. 29). Preferably, such an amino acid sequence has no more than a total of 5 (such as 4, 3, 2 or only one) such amino acid differences in the CDR's and/or no more than a total of 5 (such as 4, 3. 2 or only 1) such amino acid differences in the framework sequences;
   [1307] and/or that
[1308] c) is either (i) capable of cross-blocking (as defined herein) the interaction of at least one of the amino acid sequences of SEQ ID NO's: 2125; 2126; 2127; 2128; 2129; 2130; 2131; 2132; 2133; 2134; 2135; 2136; 2137; 2138; 2139; 2140 and/or 2141 with the IL-23R subunit and/or (ii) being able to compete with (i.e. is a competitor for) the binding of at least one of the amino acid sequences of SEQ ID NO's: 2125; 2126; 2127; 2128; 2129; 2130; 2131; 2132; 2133; 2134; 2135; 2136; 2137; 2138; 2139; 2140 and/or 2141 (see Table A-2 and FIGS. 29) to 1L-23R.

[1309] In another preferred, but non-limiting aspect, an IL-23R sequence is chosen from one of the amino acid sequences of SEQ ID NO's: 2125; 2126; 2127; 2128; 2129; 2130; 2131; 2132; 2133; 2134; 2135; 2136; 2137; 2138; 2139; 2140 and/or 2141 (see Table A-2 and FIG. 29).

[1310] In some other non-limiting aspects, the invention relates to:
[1311] an amino acid sequence, protein or polypeptide that is directed against a heterodimeric cytokine that comprises at least one p19 subunit, which amino acid sequence, protein or polypeptide comprises or essentially consists of at least one p19+ sequence (as defined herein);
[1312] an amino acid sequence, protein or polypeptide that is directed against a heterodimeric cytokine that comprises at least one p19 subunit, which amino acid sequence, protein or polypeptide comprises or essentially consists of at least one p19− sequence (as defined herein);
[1313] an amino acid sequence, protein or polypeptide that is directed against a heterodimeric cytokine that comprises at least one p40 subunit, which amino acid sequence, protein or polypeptide comprises or essentially consists of at least one p40− sequence (as defined herein);
[1314] an amino acid sequence, protein or polypeptide that is directed against a heterodimeric cytokine that comprises at least one p40 subunit, which amino acid sequence, protein or polypeptide comprises or essentially consists of at least one p40+ sequence (as defined herein);
[1315] an amino acid sequence, protein or polypeptide that is directed against a heterodimeric cytokine that comprises at least one p35 subunit, which amino acid sequence, protein or polypeptide comprises or essentially consists of at least one p35 sequence (as defined herein);
[1316] an amino acid sequence, protein or polypeptide that is directed against IL-23, which amino acid sequence, protein or polypeptide comprises or essentially consists of at least one p19+ sequence (as defined herein);
[1317] an amino acid sequence, protein or polypeptide that is directed against IL-23, which amino acid sequence, protein or polypeptide comprises or essentially consists of at least one p19− sequence (as defined herein);
[1318] an amino acid sequence, protein or polypeptide that is directed against IL-23, which amino acid sequence, protein or polypeptide comprises or essentially consists of at least one p40− sequence (as defined herein);
[1319] an amino acid sequence, protein or polypeptide that is directed against IL-23, which amino acid sequence, protein or polypeptide comprises or essentially consists of at least one p40+ sequence (as defined herein);
[1320] an amino acid sequence, protein or polypeptide that is directed against IL-12, which amino acid sequence, protein or polypeptide comprises or essentially consists of at least one p35 sequence (as defined herein);
[1321] an amino acid sequence, protein or polypeptide that is directed against IL-12, which amino acid sequence, protein or polypeptide comprises or essentially consists of at least one p40− sequence (as defined herein);
[1322] an amino acid sequence, protein or polypeptide that is directed against IL-12, which amino acid sequence, protein or polypeptide comprises or essentially consists of at least one p40+ sequence (as defined herein);
[1323] an amino acid sequence, protein or polypeptide that is directed against 1L-12 and IL-23, and that is preferably specific for (as defined herein) 1L-12 and/or IL-23 compared to IL-27 and/or IL-35, which amino acid sequence, protein or polypeptide comprises or essentially consists of at least one p40− sequence (as defined herein);
[1324] an amino acid sequence, protein or polypeptide that is directed against IL-12 and IL-23, and that is preferably specific for (as defined herein) IL-12 and/or IL-23 compared to IL-27 and/or IL-35, which amino acid sequence, protein or polypeptide comprises or essentially consists of at least one p40+ sequence (as defined herein);
[1325] an amino acid sequence, protein or polypeptide that is directed against IL-27, and that is preferably specific for (as defined herein) IL-27 compared to 1L-12 and/or 1L-23, which amino acid sequence, protein or polypeptide comprises or essentially consists of at least one IL-27 sequence (as defined herein);
[1326] an amino acid sequence, protein or polypeptide that is directed against a receptor for a heterodimeric cytokine that comprises at least one IL-12Rb1 subunit, which amino acid sequence, protein or polypeptide comprises or essentially consists of at least one IL-12Rb1 sequence (as defined herein);
[1327] an amino acid sequence, protein or polypeptide that is directed against a receptor for a heterodimeric cytokine that comprises at least one IL-12Rb2 subunit, which amino acid sequence, protein or polypeptide comprises or essentially consists of at least one IL-12Rb2 sequence (as defined herein);
[1328] an amino acid sequence, protein or polypeptide that is directed against a receptor for a heterodimeric cytokine that comprises at least one IL-23R subunit, which amino acid sequence, protein or polypeptide comprises or essentially consists of at least one IL-23R sequence (as defined herein);
[1329] an amino acid sequence, protein or polypeptide that is directed against the (cognate) receptor for IL-23, which amino acid sequence, protein or polypeptide comprises or essentially consists of at least one IL-12Rb1 sequence (as defined herein);
[1330] an amino acid sequence, protein or polypeptide that is directed against the (cognate) receptor for IL-23, and that is preferably specific for (as defined herein) the (cognate) receptor for IL-23 compared to the (cognate) receptor for 1L-12, which amino acid sequence, protein or polypeptide comprises or essentially consists of at least one IL-23R sequence (as defined herein);
[1331] an amino acid sequence, protein or polypeptide that is directed against the (cognate) receptor for IL-12, which amino acid sequence, protein or polypeptide comprises or essentially consists of at least one IL-12Rb1 sequence (as defined herein);
[1332] an amino acid sequence, protein or polypeptide that is directed against the (cognate) receptor for IL-12, and that is preferably specific for (as defined herein) the (cognate) receptor for IL-12 compared to the (cognate) receptor for IL-23, which amino acid sequence, protein or polypeptide comprises or essentially consists of at least one IL-12Rb2 sequence (as defined herein);
[1333] an amino acid sequence, protein or polypeptide that is directed against the (cognate) receptor for IL-12 as well as the cognate receptor for IL-23, and that is preferably specific for (as defined herein) the (cognate) receptor for IL-12 and/or the cognate receptor for IL-27 and/or the (cognate) receptor for Il-35, which amino acid sequence, protein or polypeptide comprises or essentially consists of at least one IL-12Rb1 sequence (as defined herein).

[1334] Again, such amino acid sequences, proteins or polypeptides can be as further described herein. The invention also relates to nucleotide sequences/nucleic acids encoding the same, to preparations and formulations comprising the same, to methods for producing the same and to uses of the same, all as further described herein.

[1335] In the amino acid sequence of the invention (such as the p19+ sequences, p19− sequences, p40+ sequences, p40− sequences, p35 sequences, IL-27 sequences, IL-12Rb1 sequences, IL-12Rb2 sequences and IL-23 sequences described herein), the framework sequences may be any suitable framework sequences, and examples of suitable framework sequences will be clear to the skilled person, for example on the basis the standard handbooks and the further disclosure and prior art mentioned herein.

[1336] The framework sequences are preferably (a suitable combination of) immunoglobulin framework sequences or framework sequences that have been derived from immunoglobulin framework sequences (for example, by humanization or camelization). For example, the framework sequences may be framework sequences derived from a light chain variable domain (e.g. a V_{L}-sequence) and/or from a heavy chain variable domain (e.g. a V_{H}-sequence). In one particularly preferred aspect, the framework sequences are either framework sequences that have been derived from V_{HH}-sequence (in which said framework sequences may optionally have been partially or fully humanized) or are conventional V_{H} sequences that have been camelized (as defined herein).

[1337] The framework sequences are preferably such that the amino acid sequence of the invention is a domain antibody (or an amino acid sequence that is suitable for use as a domain antibody); is a single domain antibody (or an amino acid sequence that is suitable for use as a single domain antibody); is a “dAb” (or an amino acid sequence that is suitable for use as a dAb); or is a Nanobody™ (including but not limited to V_{HH} sequence). Again, suitable framework sequences will be clear to the skilled person, for example on the basis the standard handbooks and the further disclosure and prior art mentioned herein.

[1338] In particular, the framework sequences present in the amino acid sequences of the invention may contain one or more of Hallmark residues (as defined herein), such that the amino acid sequence of the invention is a Nanobody™. Some preferred, but non-limiting examples of (suitable combinations of) such framework sequences will become clear from the further disclosure herein.

[1339] Again, as generally described herein for the amino acid sequences of the invention, it is also possible to use suitable fragments (or combinations of fragments) of any of the foregoing, such as fragments that contain one or more CDR sequences, suitably flanked by and/or linked via one or more framework sequences (for example, in the same order as these CDR's and framework sequences may occur in the full-sized immunoglobulin sequence from which the fragment has been derived). Such fragments may also again be such that they comprise or can form an immunoglobulin fold, or alternatively be such that they do not comprise or cannot form an immunoglobulin fold.

[1340] In one specific aspect, such a fragment comprises a single CDR sequence as described herein (and in particular a CDR3 sequence), that is flanked on each side by (part of) a framework sequence (and in particular, part of the framework sequence(s) that, in the immunoglobulin sequence from which the fragment is derived, are adjacent to said CDR sequence. For example, a CDR3 sequence may be preceded by (part of) a FR3 sequence and followed by (part of) a FR4 sequence). Such a fragment may also contain a disulphide bridge, and in particular a disulphide bridge that links the two framework regions that precede and follow the CDR sequence, respectively (for the purpose of forming such a disulphide bridge, cysteine residues that naturally occur in said framework regions may be used, or alternatively cysteine residues may be synthetically added to or introduced into said framework regions). For a further description of these “Expedite fragments”, reference is again made to WO 03/050531, as well as to the US provisional application of Ablynx N.V. entitled “Peptides capable of binding to serum proteins” of Ablynx N.V. (inventors: Revets, Hilde Adi Pierrette; Kolkman, Joost Alexander; and Hoogenboom, Hendricus Renerus Jacobus Mattheus) filed on Dec. 5, 2006 (see also PCT/EP2007/063348).

[1341] In another aspect, the invention relates to a compound or construct, and in particular a protein or polypeptide (also referred to herein as a “compound of the invention” or “polypeptide of the invention”, respectively) that comprises or essentially consists of one or more amino acid sequences of the invention (or suitable fragments thereof), and optionally further comprises one or more other groups, residues, moieties or binding units. As will become clear to the skilled person from the further disclosure herein, such further groups, residues, moieties, binding units or amino acid sequences may or may not provide further functionality to the amino acid sequence of the invention (and/or to the compound or construct in which it is present) and may or may not modify the properties of the amino acid sequence of the invention.

[1342] For example, such further groups, residues, moieties or binding units may be one or more additional amino acid sequences, such that the compound or construct is a (fusion) protein or (fusion) polypeptide. In a preferred but non-limiting aspect, said one or more other groups, residues, moieties or binding units are immunoglobulin sequences. Even more preferably, said one or more other groups, residues, moieties or binding units are chosen from the group consisting of domain antibodies, amino acid sequences that are suitable for use as a domain antibody, single domain antibodies, amino acid sequences that are suitable for use as a single domain antibody, “dAb”'s, amino acid sequences that are suitable for use as a dAb, or Nanobodies.

[1343] Alternatively, such groups, residues, moieties or binding units may for example be chemical groups, residues, moieties, which may or may not by themselves be biologically and/or pharmacologically active. For example, and without limitation, such groups may be linked to the one or more amino acid sequences of the invention so as to provide a “derivative” of an amino acid sequence or polypeptide of the invention, as further described herein.

[1344] Also within the scope of the present invention are compounds or constructs, that comprises or essentially consists of one or more derivatives as described herein, and optionally further comprises one or more other groups, residues, moieties or binding units, optionally linked via one or more linkers. Preferably, said one or more other groups, residues, moieties or binding units are amino acid sequences.

[1345] In the compounds or constructs described above, the one or more amino acid sequences of the invention and the one or more groups, residues, moieties or binding units may be linked directly to each other and/or via one or more suitable linkers or spacers. For example, when the one or more groups, residues, moieties or binding units are amino acid sequences, the linkers may also be amino acid sequences, so that the resulting compound or construct is a fusion (protein) or fusion (polypeptide).

[1346] The compounds or polypeptides of the invention can generally be prepared by a method which comprises at least one step of suitably linking the one or more amino acid sequences of the invention to the one or more further groups, residues, moieties or binding units, optionally via the one or more suitable linkers, so as to provide the compound or polypeptide of the invention. Polypeptides of the invention can also be prepared by a method which generally comprises at least the steps of providing a nucleic acid that encodes a polypeptide of the invention, expressing said nucleic acid in a suitable manner, and recovering the expressed polypeptide of the invention. Such methods can be performed in a manner known per se, which will be clear to the skilled person, for example on the basis of the methods and techniques further described herein.

[1347] The process of designing/selecting and/or preparing a compound or polypeptide of the invention, starting from an amino acid sequence of the invention, is also referred to herein as “formatting” said amino acid sequence of the invention; and an amino acid of the invention that is made part of a compound or polypeptide of the invention is said to be “formatted” or to be “in the format of” said compound or polypeptide of the invention. Examples of ways in which an amino acid sequence of the invention can be formatted and examples of such formats will be clear to the skilled person based on the disclosure herein; and such formatted amino acid sequences form a further aspect of the invention.

[1348] In one specific aspect of the invention, a compound of the invention or a polypeptide of the invention may have an increased half-life, compared to the corresponding amino acid sequence of the invention. Some preferred, but non-limiting examples of such compounds and polypeptides will become clear to the skilled person based on the further disclosure herein, and for example comprise amino acid sequences or polypeptides of the invention that have been chemically modified to increase the half-life thereof (for example, by means of pegylation); amino acid sequences of the invention that comprise at least one additional binding site for binding to a serum protein (such as serum albumin; see for example EP 0 368 684 B1, page 4); or polypeptides of the invention that comprise at least one amino acid sequence of the invention that is linked to at least one moiety (and in particular at least one amino acid sequence) that increases the half-life of the amino acid sequence of the invention. Examples of polypeptides of the invention that comprise such half-life extending moieties or amino acid sequences will become clear to the skilled person based on the further disclosure herein; and for example include, without limitation, polypeptides in which the one or more amino acid sequences of the invention are suitable linked to one or more serum proteins or fragments thereof (such as (human) serum albumin or suitable fragments thereof) or to one or more binding units that can bind to serum proteins (such as, for example, domain antibodies, amino acid sequences that are suitable for use as a domain antibody, single domain antibodies, amino acid sequences that are suitable for use as a single domain antibody, “dAb”'s, amino acid sequences that are suitable for use as a dAb, or Nanobodies that can bind to serum proteins such as serum albumin (such as human serum albumin), serum immunoglobulins such as IgG, or transferrine; reference is made to the further description and references mentioned herein); polypeptides in which an amino acid sequence of the invention is linked to an Fc portion (such as a human Fc) or a suitable part or fragment thereof; or polypeptides in which the one or more amino acid sequences of the invention are suitable linked to one or more small proteins or peptides that can bind to serum proteins (such as, without limitation, the proteins and peptides described in WO 91/01743, WO 01/45746, WO 02/076489 and to the US provisional application of Ablynx N.V. entitled “Peptides capable of binding to serum proteins” of Ablynx N.V. filed on Dec. 5, 2006 (see also PCT/EP2007/063348 and WO 08/068280) as well as the U.S. provisional applications 61/050,385 and 61/045,690 of Ablynx N.V. both entitled “Improved peptides capable of binding to serum proteins”

[1349] Generally, the compounds or polypeptides of the invention with increased half-life preferably have a half-life that is at least 1.5 times, preferably at least 2 times, such as at least 5 times, for example at least 10 times or more than 20 times, greater than the half-life of the corresponding amino acid sequence of the invention per se. For example, the compounds or polypeptides of the invention with increased half-life may have a half-life that is increased with more than 1 hours, preferably more than 2 hours, more preferably more than 6 hours, such as more than 12 hours, or even more than 24, 48 or 72 hours, compared to the corresponding amino acid sequence of the invention per se.

[1350] In a preferred, but non-limiting aspect of the invention, such compounds or polypeptides of the invention have a serum half-life that is increased with more than 1 hours, preferably more than 2 hours, more preferably more than 6 hours, such as more than 12 hours, or even more than 24, 48 or 72 hours, compared to the corresponding amino acid sequence of the invention per se.

[1351] In another preferred, but non-limiting aspect of the invention, such compounds or polypeptides of the invention exhibit a serum half-life in human of at least about 12 hours, preferably at least 24 hours, more preferably at least 48 hours, even more preferably at least 72 hours or more. For example, compounds or polypeptides of the invention may have a half-life of at least 5 days (such as about 5 to 10 days), preferably at least 9 days (such as about 9 to 14 days), more preferably at least about 10 days (such as about 10 to 15 days), or at least about 11 days (such as about 11 to 16 days), more preferably at least about 12 days (such as about 12 to 18 days or more), or more than 14 days (such as about 14 to 19 days).

[1352] Some preferred, but non-limiting examples of polypeptides of the invention are:
[1353] the polypeptides of SEQ 1D NO: 2142; SEQ ID NO: 2143; SEQ ID NO: 2144; SEQ ID NO: 2145; SEQ ID NO: 2146; SEQ ID NO: 2147; SEQ ID NO: 2148; SEQ ID NO: 2149; SEQ ID NO: 2150; SEQ ID NO: 2151; SEQ ID NO: 2152; SEQ ID NO: 2153; SEQ ID NO: 2154; SEQ ID NO: 2155; SEQ ID NO: 2156; SEQ ID NO: 2157; SEQ ID NO: 2158; SEQ ID NO: 2159; SEQ ID NO: 2160; SEQ ID NO: 2161; SEQ ID NO: 2162; SEQ ID NO: 2163; SEQ ID NO: 2164; SEQ ID NO: 2165; SEQ ID NO: 2166; SEQ ID NO: 2167; SEQ ID NO: 2168; SEQ ID NO: 2169; SEQ ID NO: 2530; SEQ ID NO: 2531; SEQ ID NO: 2532; SEQ ID NO: 2533; SEQ ID NO: 2534; SEQ ID NO: 2535; SEQ ID NO: 2536; SEQ ID NO: 2537; SEQ ID NO: 2538; SEQ ID NO: 2539; SEQ ID NO: 2540; SEQ ID NO: 2541; SEQ ID NO: 2542; SEQ ID NO: 2543; SEQ ID NO: 2544; SEQ ID NO: 2545; SEQ ID NO: 2546; SEQ ID NO: 2547; SEQ ID NO: 2548; SEQ ID NO: 2549; SEQ ID NO: 2550; SEQ ID NO: 2551; SEQ ID NO: 2552; SEQ ID NO: 2553; SEQ ID NO: 2554; SEQ ID NO: 2555; SEQ ID NO: 2556; SEQ ID NO: 2557 and/or SEQ ID NO: 2558 (see also FIG. 30); which are some non-limiting examples of multivalent, multispecific and/or biparatopic polypeptides of the invention that are directed against p19 (i.e. comprising at least one p19+ sequence and/or at least one p19− sequence). These polypeptides are directed against (as defined herein) and (expected to be) specific for (as defined herein) a heterodimeric cytokine comprising a p19 subunit (compared to other heterodimeric cytokines that do not comprise a p19 subunit). For example, these polypeptides are expected to be specific for (as defined herein) IL-23 compared to IL-12 (and also IL-27 and/or IL-35);
[1354] the polypeptides of SEQ ID NO: 2615; SEQ ID NO: 2616; SEQ ID NO: 2617; SEQ ID NO: 2618; SEQ ID NO: 2619; SEQ ID NO: 2620; SEQ ID NO: 2621 and/or SEQ ID NO: 2622 (see also FIG. 32); which are some non-limiting examples of multivalent, multispecific and/or biparatopic polypeptides of the invention that are directed against p19 that comprise at least one humanized p19+ sequence and/or at least one humanized p19− sequence). These polypeptides are directed against (as defined herein) and (expected to be) specific for (as defined herein) a heterodimeric cytokine comprising a p19 subunit (compared to other heterodimeric cytokines that do not comprise a p19 subunit). For example, these polypeptides are expected to be specific for (as defined herein) IL-23 compared to IL-12 (and also IL-27 and/or IL-35);
[1355] the polypeptides of SEQ ID NO: 2623; SEQ ID NO: 2624; SEQ ID NO: 2625; SEQ ID NO: 2626; SEQ ID NO: 2627; SEQ ID NO: 2628; SEQ ID NO: 2629; SEQ ID NO: 2643 and/or SEQ ID NO: 2644 (see also FIG. 33); which are some non-limiting examples of multispecific “p19-p40” polypeptides of the invention that comprise at least one amino acid sequence of the invention that is directed against p19 (i.e. at least one p19+ sequence and/or at least one p19− sequence) and at least one amino acid sequence of the invention that is directed against p40 (i.e. at least one p40+ sequence and/or at least one p40− sequence). These polypeptides are expected to be specific for (as defined herein) IL-23 compared to IL-12 (and also IL-27 and/or IL-35);
[1356] the polypeptides of SEQ ID NO: 2630; SEQ ID NO: 2631; SEQ ID NO: 2632; SEQ ID NO: 2633; SEQ ID NO: 2634; SEQ ID NO: 2635; SEQ ID NO: 2636; SEQ ID NO: 2637; SEQ ID NO: 2638; SEQ ID NO: 2639; SEQ ID NO: 2640 and/or SEQ ID NO: 2641 (see also FIG. 34); which are some non-limiting examples of multivalent, multispecific and/or biparatopic polypeptides of the invention that are directed against p40 (i.e. comprising at least one p40+ sequence and/or at least one p40− sequence). These polypeptides are directed against (as defined herein) and (expected to be) specific for (as defined herein) a heterodimeric cytokine comprising a p40 subunit (compared to other heterodimeric cytokines that do not comprise a p40 subunit). For example, these polypeptides are expected to be specific for (as defined herein) IL-23 and/or IL-12 compared to IL-27 and/or IL 35;
[1357] the polypeptides of SEQ ID NO: 2645 and/or SEQ ID NO: 2646 (see also FIG. 35), which are some non-limiting examples of multivalent, multispecific and/or biparatopic polypeptides of the invention that are directed against p35. These polypeptides are directed against (as defined herein) and (expected to be) specific for (as defined herein) a heterodimeric cytokine comprising a p35 subunit (compared to other heterodimeric cytokines that do not comprise a p35 subunit). For example, these polypeptides are expected to be specific for (as defined herein) IL-12 compared to IL-23 (and also IL-27 and/or IL-35);
[1358] the polypeptides of SEQ ID NO: 2647 and/or SEQ ID NO: 2648 (see also FIG. 36), which are some non-limiting examples of multispecific “p35-p40” polypeptides of tolypepe invention that comprise at least one amino acid sequence of the invention that is directed against p35 and at least one amino acid sequence of the invention that is directed against p40 (i.e. at least one p40+ sequence and/or at least one p40− sequence). These polypeptides are expected to be specific for (as defined herein) IL-12 compared to IL-23 (and also IL-27 and/or IL-35).

[1359] Other examples of polypeptides suitable for use in the invention, of amino acid sequences of the invention (or nucleotide sequences/nucleic acids comprising the same) that can be used in such polypeptides (such as the p19+ sequences, p19− sequences, p40 + sequences, p40− sequences, p35 sequences, IL-27 sequences, IL-12Rb1 sequences, IL-12Rb2 sequences and IL-23 sequences described herein), and how polypeptides of the invention can be constructed and produced using such amino acid sequences of the invention will be clear to the skilled person based on the disclosure herein.

[1360] Thus, some further aspects of the invention relate to:
[1361] the polypeptide (construct) of SEQ ID NO: 2142; or a polypeptide (construct) that has at least 70%, preferably at least 80%, more preferably at least 85%, such as at least 90%, for example more than 95%, amino acid identity (as defined herein) with the polypeptide of SEQ ID NO: 2142;
[1362] the polypeptide (construct) of SEQ ID NO: 2143; or a polypeptide (construct) that has at least 70%, preferably at least 80%, more preferably at least 85%, such as at least 90%, for example more than 95%, amino acid identity (as defined herein) with the polypeptide of SEQ ID NO: 2143;
[1363] the polypeptide (construct) of SEQ ID NO: 2144; or a polypeptide (construct) that has at least 70%, preferably at least 80%, more preferably at least 85%, such as at least 90%, for example more than 95%, amino acid identity (as defined herein) with the polypeptide of SEQ ID NO: 2144;
[1364] the polypeptide (construct) of SEQ ID NO: 2145; or a polypeptide (construct) that has at least 70%, preferably at least 80%, more preferably at least 85%, such as at least 90%, for example more than 95%, amino acid identity (as defined herein) with the polypeptide of SEQ ID NO: 2145;
[1365] the polypeptide (construct) of SEQ ID NO: 2146; or a polypeptide (construct) that has at least 70%, preferably at least 80%, more preferably at least 85%, such as at least 90%, for example more than 95%, amino acid identity (as defined herein) with the polypeptide of SEQ ID NO: 2146;
[1366] the polypeptide (construct) of SEQ ID NO: 2147; or a polypeptide (construct) that has at least 70%, preferably at least 80%, more preferably at least 85%, such as at least 90%, for example more than 95%, amino acid identity (as defined herein) with the polypeptide of SEQ ID NO: 2147;
[1367] the polypeptide (construct) of SEQ ID NO: 2148; or a polypeptide (construct) that has at least 70%, preferably at least 80%, more preferably at least 85%, such as at least 90%, for example more than 95%, amino acid identity (as defined herein) with the polypeptide of SEQ ID NO: 2148;
[1368] the polypeptide (construct) of SEQ ID NO: 2149; or a polypeptide (construct) that has at least 70%, preferably at least 80%, more preferably at least 85%, such as at least 90%, for example more than 95%, amino acid identity (as defined herein) with the polypeptide of SEQ ID NO: 2149;
[1369] the polypeptide (construct) of SEQ ID NO: 2150; or a polypeptide (construct) that has at least 70%, preferably at least 80%, more preferably at least 85%, such as at least 90%, for example more than 95%, amino acid identity (as defined herein) with the polypeptide of SEQ ID NO: 2150;
[1370] the polypeptide (construct) of SEQ ID NO: 2151; or a polypeptide (construct) that has at least 70%, preferably at least 80%, more preferably at least 85%, such as at least 90%, for example more than 95%, amino acid identity (as defined herein) with the polypeptide of SEQ ID NO: 2151;
[1371] the polypeptide (construct) of SEQ ID NO: 2152; or a polypeptide (construct) that has at least 70%, preferably at least 80%, more preferably at least 85%, such as at least 90%, for example more than 95%, amino acid identity (as defined herein) with the polypeptide of SEQ ID NO: 2152;
[1372] the polypeptide (construct) of SEQ ID NO: 2153; or a polypeptide (construct) that has at least 70%, preferably at least 80%, more preferably at least 85%, such as at least 90%, for example more than 95%, amino acid identity (as defined herein) with the polypeptide of SEQ ID NO: 2153;
[1373] the polypeptide (construct) of SEQ ID NO: 2154; or a polypeptide (construct) that has at least 70%, preferably at least 80%, more preferably at least 85%, such as at least 90%, for example more than 95%, amino acid identity (as defined herein) with the polypeptide of SEQ ID NO: 2154;
[1374] the polypeptide (construct) of SEQ ID NO: 2155; or a polypeptide (construct) that has at least 70%, preferably at least 80%, more preferably at least 85%, such as at least 90%, for example more than 95%, amino acid identity (as defined herein) with the polypeptide of SEQ ID NO: 2155;
[1375] the polypeptide (construct) of SEQ ID NO: 2156; or a polypeptide (construct) that has at least 70%, preferably at least 80%, more preferably at least 85%, such as at least 90%, for example more than 95%, amino acid identity (as defined herein) with the polypeptide of SEQ ID NO: 2156;
[1376] the polypeptide (construct) of SEQ ID NO: 2157; or a polypeptide (construct) that has at least 70%, preferably at least 80%, more preferably at least 85%, such as at least 90%, for example more than 95%, amino acid identity (as defined herein) with the polypeptide of SEQ ID NO: 2157;
[1377] the polypeptide (construct) of SEQ ID NO: 2158; or a polypeptide (construct) that has at least 70%, preferably at least 80%, more preferably at least 85%, such as at least 90%, for example more than 95%, amino acid identity (as defined herein) with the polypeptide of SEQ ID NO: 2158;
[1378] the polypeptide (construct) of SEQ ID NO: 2159; or a polypeptide (construct) that has at least 70%, preferably at least 80%, more preferably at least 85%, such as at least 90%, for example more than 95%, amino acid identity (as defined herein) with the polypeptide of SEQ ID NO: 2159;
[1379] the polypeptide (construct) of SEQ ID NO: 2160; or a polypeptide (construct) that has at least 70%, preferably at least 80%, more preferably at least 85%, such as at least 90%, for example more than 95%, amino acid identity (as defined herein) with the polypeptide of SEQ ID NO: 2160;
[1380] the polypeptide (construct) of SEQ ID NO: 2161; or a polypeptide (construct) that has at least 70%, preferably at least 80%, more preferably at least 85%, such as at least 90%, for example more than 95%, amino acid identity (as defined herein) with the polypeptide of SEQ ID NO: 2161;
[1381] the polypeptide (construct) of SEQ ID NO: 2162; or a polypeptide (construct) that has at least 70%, preferably at least 80%, more preferably at least 85%, such as at least 90%, for example more than 95%, amino acid identity (as defined herein) with the polypeptide of SEQ ID NO: 2162;
[1382] the polypeptide (construct) of SEQ ID NO: 2163; or a polypeptide (construct) that has at least 70%, preferably at least 80%, more preferably at least 85%, such as at least 90%, for example more than 95%, amino acid identity (as defined herein) with the polypeptide of SEQ ID NO: 2163;
[1383] the polypeptide (construct) of SEQ ID NO: 2164; or a polypeptide (construct) that has at least 70%, preferably at least 80%, more preferably at least 85%, such as at least 90%, for example more than 95%, amino acid identity (as defined herein) with the polypeptide of SEQ ID NO: 2164;
[1384] the polypeptide (construct) of SEQ ID NO: 2165; or a polypeptide (construct) that has at least 70%, preferably at least 80%, more preferably at least 85%, such as at least 90%, for example more than 95%, amino acid identity (as defined herein) with the polypeptide of SEQ ID NO: 2165;
[1385] the polypeptide (construct) of SEQ ID NO: 2166; or a polypeptide (construct) that has at least 70%, preferably at least 80%, more preferably at least 85%, such as at least 90%, for example more than 95%, amino acid identity (as defined herein) with the polypeptide of SEQ ID NO: 2166;
[1386] the polypeptide (construct) of SEQ ID NO: 2167; or a polypeptide (construct) that has at least 70%, preferably at least 80%, more preferably at least 85%, such as at least 90%, for example more than 95%, amino acid identity (as defined herein) with the polypeptide of SEQ ID NO: 2167;
[1387] the polypeptide (construct) of SEQ ID NO: 2168; or a polypeptide (construct) that has at least 70%, preferably at least 80%, more preferably at least 85%, such as at least 90%, for example more than 95%, amino acid identity (as defined herein) with the polypeptide of SEQ ID NO: 2168;
[1388] the polypeptide (construct) of SEQ ID NO: 2169; or a polypeptide (construct) that has at least 70%, preferably at least 80%, more preferably at least 85%, such as at least 90%, for example more than 95%, amino acid identity (as defined herein) with the polypeptide of SEQ ID NO: 2169;
[1389] the polypeptide (construct) of SEQ ID NO: 2530; or a polypeptide (construct) that has at least 70%, preferably at least 80%, more preferably at least 85%, such as at least 90%, for example more than 95%, amino acid identity (as defined herein) with the polypeptide of SEQ ID NO: 2530;
[1390] the polypeptide (construct) of SEQ ID NO: 2531; or a polypeptide (construct) that has at least 70%, preferably at least 80%, more preferably at least 85%, such as at least 90%, for example more than 95%, amino acid identity (as defined herein) with the polypeptide of SEQ ID NO: 2531;
[1391] the polypeptide (construct) of SEQ ID NO: 2532; or a polypeptide (construct) that has at least 70%, preferably at least 80%, more preferably at least 85%, such as at least 90%, for example more than 95%, amino acid identity (as defined herein) with the polypeptide of SEQ ID NO: 2532;
[1392] the polypeptide (construct) of SEQ ID NO: 2533; or a polypeptide (construct) that has at least 70%, preferably at least 80%, more preferably at least 85%, such as at least 90%, for example more than 95%, amino acid identity (as defined herein) with the polypeptide of SEQ ID NO: 2533;
[1393] the polypeptide (construct) of SEQ ID NO: 2534; or a polypeptide (construct) that has at least 70%, preferably at least 80%, more preferably at least 85%, such as at least 90%, for example more than 95%, amino acid identity (as defined herein) with the polypeptide of SEQ ID NO: 2534;
[1394] the polypeptide (construct) of SEQ ID NO: 2535; or a polypeptide (construct) that has at least 70%, preferably at least 80%, more preferably at least 85%, such as at least 90%, for example more than 95%, amino acid identity (as defined herein) with the polypeptide of SEQ ID NO: 2535;
[1395] the polypeptide (construct) of SEQ ID NO: 2536; or a polypeptide (construct) that has at least 70%, preferably at least 80%, more preferably at least 85%, such as at least 90%, for example more than 95%, amino acid identity (as defined herein) with the polypeptide of SEQ ID NO: 2536;
[1396] the polypeptide (construct) of SEQ ID NO: 2537; or a polypeptide (construct) that has at least 70%, preferably at least 80%, more preferably at least 85%, such as at least 90%, for example more than 95%, amino acid identity (as defined herein) with the polypeptide of SEQ ID NO: 2537;
[1397] the polypeptide (construct) of SEQ ID NO: 2538; or a polypeptide (construct) that has at least 70%, preferably at least 80%, more preferably at least 85%, such as at least 90%, for example more than 95%, amino acid identity (as defined herein) with the polypeptide of SEQ ID NO: 2538;
[1398] the polypeptide (construct) of SEQ ID NO: 2539; or a polypeptide (construct) that has at least 70%, preferably at least 80%, more preferably at least 85%, such as at least 90%, for example more than 95%, amino acid identity (as defined herein) with the polypeptide of SEQ ID NO: 2539;
[1399] the polypeptide (construct) of SEQ ID NO: 2540; or a polypeptide (construct) that has at least 70%, preferably at least 80%, more preferably at least 85%, such as at least 90%, for example more than 95%, amino acid identity (as defined herein) with the polypeptide of SEQ ID NO: 2540;
[1400] the polypeptide (construct) of SEQ ID NO: 2541; or a polypeptide (construct) that has at least 70%, preferably at least 80%, more preferably at least 85%, such as at least 90%, for example more than 95%, amino acid identity (as defined herein) with the polypeptide of SEQ ID NO: 2541;
[1401] the polypeptide (construct) of SEQ ID NO: 2542; or a polypeptide (construct) that has at least 70%, preferably at least 80%, more preferably at least 85%, such as at least 90%, for example more than 95%, amino acid identity (as defined herein) with the polypeptide of SEQ ID NO: 2542;
[1402] the polypeptide (construct) of SEQ ID NO: 2543; or a polypeptide (construct) that has at least 70%, preferably at least 80%, more preferably at least 85%, such as at least 90%, for example more than 95%, amino acid identity (as defined herein) with the polypeptide of SEQ ID NO: 2543;
[1403] the polypeptide (construct) of SEQ ID NO: 2544; or a polypeptide (construct) that has at least 70%, preferably at least 80%, more preferably at least 85%, such as at least 90%, for example more than 95%, amino acid identity (as defined herein) with the polypeptide of SEQ ID NO: 2544;
[1404] the polypeptide (construct) of SEQ ID NO: 2545; or a polypeptide (construct) that has at least 70%, preferably at least 80%, more preferably at least 85%, such as at least 90%, for example more than 95%, amino acid identity (as defined herein) with the polypeptide of SEQ ID NO: 2545;
[1405] the polypeptide (construct) of SEQ ID NO: 2546; or a polypeptide (construct) that has at least 70%, preferably at least 80%, more preferably at least 85%, such as at least 90%, for example more than 95%, amino acid identity (as defined herein) with the polypeptide of SEQ ID NO: 2546;
[1406] the polypeptide (construct) of SEQ ID NO: 2547; or a polypeptide (construct) that has at least 70%, preferably at least 80%, more preferably at least 85%, such as at least 90%, for example more than 95%, amino acid identity (as defined herein) with the polypeptide of SEQ ID NO: 2547;
[1407] the polypeptide (construct) of SEQ ID NO: 2548; or a polypeptide (construct) that has at least 70%, preferably at least 80%, more preferably at least 85%, such as at least 90%, for example more than 95%, amino acid identity (as defined herein) with the polypeptide of SEQ ID NO: 2548;
[1408] the polypeptide (construct) of SEQ ID NO: 2549; or a polypeptide (construct) that has at least 70%, preferably at least 80%, more preferably at least 85%, such as at least 90%, for example more than 95%, amino acid identity (as defined herein) with the polypeptide of SEQ ID NO: 2549;
[1409] the polypeptide (construct) of SEQ ID NO: 2550; or a polypeptide (construct) that has at least 70%, preferably at least 80%, more preferably at least 85%, such as at least 90%, for example more than 95%, amino acid identity (as defined herein) with the polypeptide of SEQ ID NO: 2550;
[1410] the polypeptide (construct) of SEQ ID NO: 2551; or a polypeptide (construct) that has at least 70%, preferably at least 80%, more preferably at least 85%, such as at least 90%, for example more than 95%, amino acid identity (as defined herein) with the polypeptide of SEQ ID NO: 2551;
[1411] the polypeptide (construct) of SEQ ID NO: 2552; or a polypeptide (construct) that has at least 70%, preferably at least 80%, more preferably at least 85%, such as at least 90%, for example more than 95%, amino acid identity (as defined herein) with the polypeptide of SEQ ID NO: 2552;
[1412] the polypeptide (construct) of SEQ ID NO: 2553; or a polypeptide (construct) that has at least 70%, preferably at least 80%, more preferably at least 85%, such as at least 90%, for example more than 95%, amino acid identity (as defined herein) with the polypeptide of SEQ ID NO: 2553;
[1413] the polypeptide (construct) of SEQ ID NO: 2554; or a polypeptide (construct) that has at least 70%, preferably at least 80%, more preferably at least 85%, such as at least 90%, for example more than 95%, amino acid identity (as defined herein) with the polypeptide of SEQ ID NO: 2554;
[1414] the polypeptide (construct) of SEQ ID NO: 2555; or a polypeptide (construct) that has at least 70%, preferably at least 80%, more preferably at least 85%, such as at least 90%, for example more than 95%, amino acid identity (as defined herein) with the polypeptide of SEQ ID NO: 2555;
[1415] the polypeptide (construct) of SEQ ID NO: 2556; or a polypeptide (construct) that has at least 70%, preferably at least 80%, more preferably at least 85%, such as at least 90%, for example more than 95%, amino acid identity (as defined herein) with the polypeptide of SEQ ID NO: 2556;
[1416] the polypeptide (construct) of SEQ ID NO: 2557; or a polypeptide (construct) that has at least 70%, preferably at least 80%, more preferably at least 85%, such as at least 90%, for example more than 95%, amino acid identity (as defined herein) with the polypeptide of SEQ ID NO: 2557;
[1417] the polypeptide (construct) of SEQ ID NO: 2558; or a polypeptide (construct) that has at least 70%, preferably at least 80%, more preferably at least 85%, such as at least 90%, for example more than 95%, amino acid identity (as defined herein) with the polypeptide of SEQ ID NO: 2558;
[1418] the polypeptide (construct) of SEQ ID NO: 2615; or a polypeptide (construct) that has at least 70%, preferably at least 80%, more preferably at least 85%, such as at least 90%, for example more than 95%, amino acid identity (as defined herein) with the polypeptide of SEQ ID NO: 2615;
[1419] the polypeptide (construct) of SEQ ID NO: 2616; or a polypeptide (construct) that has at least 70%, preferably at least 80%, more preferably at least 85%, such as at least 90%, for example more than 95%, amino acid identity (as defined herein) with the polypeptide of SEQ ID NO: 2616;
[1420] the polypeptide (construct) of SEQ ID NO: 2617; or a polypeptide (construct) that has at least 70%, preferably at least 80%, more preferably at least 85%, such as at least 90%, for example more than 95%, amino acid identity (as defined herein) with the polypeptide of SEQ ID NO: 2617;
[1421] the polypeptide (construct) of SEQ ID NO: 2618; or a polypeptide (construct) that has at least 70%, preferably at least 80%, more preferably at least 85%, such as at least 9.0%, for example more than 95%, amino acid identity (as defined herein) with the polypeptide of SEQ ID NO: 2618;
[1422] the polypeptide (construct) of SEQ ID NO: 2619; or a polypeptide (construct) that has at least 70%, preferably at least 80%, more preferably at least 85%, such as at least 90%, for example more than 95%, amino acid identity (as defined herein) with the polypeptide of SEQ ID NO: 2619;
[1423] the polypeptide (construct) of SEQ ID NO: 2620; or a polypeptide (construct) that has at least 70%, preferably at least 80%, more preferably at least 85%, such as at least 90%, for example more than 95%, amino acid identity (as defined herein) with the polypeptide of SEQ ID NO: 2620;
[1424] the polypeptide (construct) of SEQ ID NO: 2621; or a polypeptide (construct) that has at least 70%, preferably at least 80%, more preferably at least 85%, such as at least 90%, for example more than 95%, amino acid identity (as defined herein) with the polypeptide of SEQ ID NO: 2621;
[1425] the polypeptide (construct) of SEQ ID NO: 2622; or a polypeptide (construct) that has at least 70%, preferably at least 80%, more preferably at least 85%, such as at least 90%, for example more than 95%, amino acid identity (as defined herein) with the polypeptide of SEQ ID NO: 2622;
   as well as to nucleotide sequences or nucleotide sequences encoding the same. These polypeptide constructs are preferably further such that they are directed against p19 and/or IL-23 (and more preferably also specific for p19 and/or IL-23), and even more preferably capable of modulating, blocking, neutralizing or inhibiting the binding of IL-23 to its cognate receptor (for example, in the alpha-screen assay described in Example 19 or 22).

[1426] Yet further aspects of the invention relate to:
[1427] the polypeptide (construct) of SEQ ID NO: 2623; or a polypeptide (construct) that has at least 70%, preferably at least 80%, more preferably at least 85%, such as at least 90%, for example more than 95%, amino acid identity (as defined herein) with the polypeptide of SEQ ID NO: 2623;
[1428] the polypeptide (construct) of SEQ ID NO: 2624; or a polypeptide (construct) that has at least 70%, preferably at least 80%, more preferably at least 85%, such as at least 90%, for example more than 95%, amino acid identity (as defined herein) with the polypeptide of SEQ ID NO: 2624;
[1429] the polypeptide (construct) of SEQ ID NO: 2625; or a polypeptide (construct) that has at least 70%, preferably at least 80%, more preferably at least 85%, such as at least 90%, for example more than 95%, amino acid identity (as defined herein) with the polypeptide of SEQ ID NO: 2625;
[1430] the polypeptide (construct) of SEQ ID NO: 2626; or a polypeptide (construct) that has at least 70%, preferably at least 80%, more preferably at least 85%, such as at least 90%, for example more than 95%, amino acid identity (as defined herein) with the polypeptide of SEQ ID NO: 2626;
[1431] the polypeptide (construct) of SEQ ID NO: 2627; or a polypeptide (construct) that has at least 70%, preferably at least 80%, more preferably at least 85%, such as at least 90%, for example more than 95%, amino acid identity (as defined herein) with the polypeptide of SEQ ID NO: 2627;
[1432] the polypeptide (construct) of SEQ ID NO: 2628; or a polypeptide (construct) that has at least 70%, preferably at least 80%, more preferably at least 85%, such as at least 90%, for example more than 95%, amino acid identity (as defined herein) with the polypeptide of SEQ ID NO: 2628;
[1433] the polypeptide (construct) of SEQ ID NO: 2629; or a polypeptide (construct) that has at least 70%, preferably at least 80%, more preferably at least 85%, such as at least 90%, for example more than 95%, amino acid identity (as defined herein) with the polypeptide of SEQ ID NO: 2629;
[1434] the polypeptide (construct) of SEQ ID NO: 2643; or a polypeptide (construct) that has at least 70%, preferably at least 80%, more preferably at least 85%, such as at least 90%, for example more than 95%, amino acid identity (as defined herein) with the polypeptide of SEQ ID NO: 2643;
[1435] the polypeptide (construct) of SEQ ID NO: 2644; or a polypeptide (construct) that has at least 70%, preferably at least 80%, more preferably at least 85%, such as at least 90%, for example more than 95%, amino acid identity (as defined herein) with the polypeptide of SEQ ID NO: 2644;
   as well as to nucleotide sequences or nucleotide sequences encoding the same. These polypeptide constructs are preferably further such that they are directed against p19 and/or IL-23 (and more preferably also specific for p19 and/or IL-23), and even more preferably capable of modulating, blocking, neutralizing or inhibiting the binding of IL-23 to its cognate receptor (for example, in the alpha-screen assay described in Example 19 or 22).

[1436] Yet further aspects of the invention relate to:
[1437] the polypeptide (construct) of SEQ ID NO: 2630; or a polypeptide (construct) that has at least 70%, preferably at least 80%, more preferably at least 85%, such as at least 90%, for example more than 95%, amino acid identity (as defined herein) with the polypeptide of SEQ ID NO: 2630;
[1438] the polypeptide (construct) of SEQ ID NO: 2631; or a polypeptide (construct) that has at least 70%, preferably at least 80%, more preferably at least 85%, such as at least 90%, for example more than 95%, amino acid identity (as defined herein) with the polypeptide of SEQ ID NO: 2631;
[1439] the polypeptide (construct) of SEQ ID NO: 2632; or a polypeptide (construct) that has at least 70%, preferably at least 80%, more preferably at least 85%, such as at least 90%, for example more than 95%, amino acid identity (as defined herein) with the polypeptide of SEQ ID NO: 2632;
[1440] the polypeptide (construct) of SEQ ID NO: 2633; or a polypeptide (construct) that has at least 70%, preferably at least 80%, more preferably at least 85%, such as at least 90%, for example more than 95%, amino acid identity (as defined herein) with the polypeptide of SEQ ID NO: 2633;
[1441] the polypeptide (construct) of SEQ ID NO: 2634; or a polypeptide (construct) that has at least 70%, preferably at least 80%, more preferably at least 85%, such as at least 90%, for example more than 95%, amino acid identity (as defined herein) with the polypeptide of SEQ ID NO: 2634;
[1442] the polypeptide (construct) of SEQ ID NO: 2635; or a polypeptide (construct) that has at least 70%, preferably at least 80%, more preferably at least 85%, such as at least 90%, for example more than 95%, amino acid identity (as defined herein) with the polypeptide of SEQ ID NO: 2635;
[1443] the polypeptide (construct) of SEQ ID NO: 2636; or a polypeptide (construct) that has at least 70%, preferably at least 80%, more preferably at least 85%, such as at least 90%, for example more than 95%, amino acid identity (as defined herein) with the polypeptide of SEQ ID NO: 2636;
[1444] the polypeptide (construct) of SEQ ID NO: 2637; or a polypeptide (construct) that has at least 70%, preferably at least 80%, more preferably at least 85%, such as at least 90%, for example more than 95%, amino acid identity (as defined herein) with the polypeptide of SEQ ID NO: 2637;
[1445] the polypeptide (construct) of SEQ ID NO: 2638; or a polypeptide (construct) that has at least 70%, preferably at least 80%, more preferably at least 85%, such as at least 90%, for example more than 95%, amino acid identity (as defined herein) with the polypeptide of SEQ ID NO: 2638;
[1446] the polypeptide (construct) of SEQ ID NO: 2639; or a polypeptide (construct) that has at least 70%, preferably at least 80%, more preferably at least 85%, such as at least 90%, for example more than 95%, amino acid identity (as defined herein) with the polypeptide of SEQ ID NO: 2639;
[1447] the polypeptide (construct) of SEQ ID NO: 2640; or a polypeptide (construct) that has at least 70%, preferably at least 80%, more preferably at least 85%, such as at least 90%, for example more than 95%, amino acid identity (as defined herein) with the polypeptide of SEQ ID NO: 2640;
[1448] the polypeptide (construct) of SEQ ID NO: 2641; or a polypeptide (construct) that has at least 70%, preferably at least 80%, more preferably at least 85%, such as at least 90%, for example more than 95%, amino acid identity (as defined herein) with the polypeptide of SEQ ID NO: 2641;
   as well as to nucleotide sequences or nucleotide sequences encoding the same. These polypeptide constructs are preferably further such that they are directed against p40, IL-12 and/or IL-23 (and more preferably also specific for p40, IL-12 and/or IL-23 compared to IL-27 and/or IL-35), and even more preferably capable of modulating, blocking, neutralizing or inhibiting the binding of IL-23 to its cognate receptor and/or of modulating, blocking, neutralizing or inhibiting the binding of IL-12 to its cognate receptor (for example, in the alpha-screen assay described in Example 19 or 22).

[1449] Yet further aspects of the invention relate to
[1450] the polypeptide (construct) of SEQ ID NO: 2645; or a polypeptide (construct) that has at least 70%, preferably at least 80%, more preferably at least 85%, such as at least 90%, for example more than 95%, amino acid identity (as defined herein) with the polypeptide of SEQ ID NO: 2645;
[1451] the polypeptide (construct) of SEQ ID NO: 2646; or a polypeptide (construct) that has at least 70%, preferably at least 80%, more preferably at least 85%, such as at least 90%, for example more than 95%, amino acid identity (as defined herein) with the polypeptide of SEQ ID NO: 2646;
   as well as to nucleotide sequences or nucleotide sequences encoding the same. These polypeptide constructs are preferably further such that they are directed against p35 and/or IL-12 (and more preferably also specific for p35 and/or IL-12), and even more preferably capable of modulating, blocking, neutralizing or inhibiting the binding of IL-12 to its cognate receptor.

[1452] Yet other aspects of the invention relate to
[1453] the polypeptide (construct) of SEQ ID NO: 2647; or a polypeptide (construct) that has at least 70%, preferably at least 80%, more preferably at least 85%, such as at least 90%, for example more than 95%, amino acid identity (as defined herein) with the polypeptide of SEQ ID NO: 2647;
[1454] the polypeptide (construct) of SEQ ID NO: 2648; or a polypeptide (construct) that has at least 70%, preferably at least 80%, more preferably at least 85%, such as at least 90%, for example more than 95%, amino acid identity (as defined herein) with the polypeptide of SEQ ID NO: 2648;
   as well as to nucleotide sequences or nucleotide sequences encoding the same. These polypeptide constructs are preferably further such that they are directed against p35 and/or IL-12 (and more preferably also specific for p35 and/or IL-12), and even more preferably capable of modulating, blocking, neutralizing or inhibiting the binding of IL-12 to its cognate receptor (for example, in the alpha-screen assay described in Example 19 or 22).

[1455] In another aspect, the invention relates to a nucleic acid that encodes an amino acid sequence of the invention (such as a (single) domain antibody and/or Nanobody of the invention) or a polypeptide of the invention (or a suitable fragment thereof). Such a nucleic acid will also be referred to herein as a “nucleic acid of the invention” and may for example be in the form of a genetic construct, as further described herein.

[1456] In another aspect, the invention relates to a host or host cell that expresses (or that under suitable circumstances is capable of expressing) an amino acid sequence of the invention (such as a (single) domain antibody and/or Nanobody of the invention) and/or a polypeptide of the invention; and/or that contains a nucleic acid of the invention. Some preferred but non-limiting examples of such hosts or host cells will become clear from the further description herein.

[1457] The invention further relates to a product or composition containing or comprising at least one amino acid sequence of the invention, at least one polypeptide of the invention (or a suitable fragment thereof) and/or at least one nucleic acid of the invention, and optionally one or more further components of such compositions known per se, i.e. depending on the intended use of the composition. Such a product or composition may for example be a pharmaceutical composition (as described herein), a veterinary composition or a product or composition for diagnostic use (as also described herein). Some preferred but non-limiting examples of such products or compositions will become clear from the further description herein.

[1458] The invention also relates to the use of an amino acid sequence, Nanobody or polypeptide of the invention, or of a composition comprising the same, in (methods or compositions for) modulating (as defined herein) a heterodimeric cytokine, a receptor for a heterodimeric cytokine and/or heterodimeric cytokine-mediated signalling (as defined herein), either in vitro (e.g. in an in vitro or cellular assay) or in vivo (e.g. in an a single cell or in a multicellular organism, and in particular in a mammal, and more in particular in a human being, such as in dhuman being that is at risk of or suffers from a disease or disorder associated with heterodimeric cytokines and their receptors).

[1459] The invention also relates to methods for modulating (as defined herein) a heterodimeric cytokine, a receptor for a heterodimeric cytokine and/or heterodimeric cytokine-mediated signalling (as defined herein), either in vitro (e.g. in an in vitro or cellular assay) or in vivo (e.g. in an a single cell or multicellular organism, and in particular in a mammal, and more in particular in a human being, such as in a human being that is at risk of or suffers from a disease or disorder associated with heterodimeric cytokines and their receptors), which method comprises at least the step of contacting a heterodimeric cytokine and/or a receptor of a heterodimeric cytokine with at least one amino acid sequence, Nanobody or polypeptide of the invention, or with a composition comprising the same, in a manner and in an amount suitable to modulate the heterodimeric cytokine, the receptor and/or heterodimeric cytokine-mediated signalling.

[1460] The invention also relates to the use of an one amino acid sequence, Nanobody or polypeptide of the invention in the preparation of a composition (such as, without limitation, a pharmaceutical composition or preparation as further described herein) for modulating (as defined herein) a heterodimeric cytokine, a receptor for a heterodimeric cytokine and/or heterodimeric cytokine-mediated signalling (as defined herein), either in vitro (e.g. in an in vitro or cellular assay) or in vivo (e.g. in an a single cell or multicellular organism, and in particular in a mammal, and more in particular in a human being, such as in a human being that is at risk of or suffers from a disease or disorder associated with heterodimeric cytokines and their receptors).

[1461] The invention further relates to methods for preparing or generating the amino acid sequences, compounds, constructs, polypeptides, nucleic acids, host cells, products and compositions described herein. Some preferred but non-limiting examples of such methods will become clear from the further description herein.

[1462] Generally, these methods may comprise the steps of:
[1463] a) providing a set, collection or library of amino acid sequences; and
[1464] b) screening said set, collection or library of amino acid sequences for amino acid sequences that can bind to and/or have affinity for heterodimeric cytokines and/or their receptors;
   [1465] and
[1466] c) isolating the amino acid sequence(s) that can bind to and/or have affinity for heterodimeric cytokines and/or their receptors.

[1467] In such a method, the set, collection or library of amino acid sequences may be any suitable set, collection or library of amino acid sequences. For example, the set, collection or library of amino acid sequences may be a set, collection or library of immunoglobulin sequences (as described herein), such as a naïve set, collection or library of immunoglobulin sequences; a synthetic or semi-synthetic set, collection or library of immunoglobulin sequences; and/or a set, collection or library of immunoglobulin sequences that have been subjected to affinity maturation.

[1468] Also, in such a method, the set, collection or library of amino acid sequences may be a set, collection or library of heavy chain variable domains (such as V_{H} domains or V_{HH} domains) or of light chain variable domains. For example, the set, collection or library of amino acid sequences may be a set, collection or library of domain antibodies or single domain antibodies, or may be a set, collection or library of amino acid sequences that are capable of functioning as a domain antibody or single domain antibody.

[1469] In a preferred aspect of this method, the set, collection or library of amino acid sequences may be an immune set, collection or library of immunoglobulin sequences, for example derived from a mammal that has been suitably immunized with heterodimeric cytokines and/or their receptors or with a suitable antigenic determinant based thereon or derived therefrom, such as an antigenic part, fragment, region, domain, loop or other epitope thereof. In one particular aspect, said antigenic determinant may be an extracellular part, region, domain, loop or other extracellular epitope(s).

[1470] In the above methods, the set, collection or library of amino acid sequences may be displayed on a phage, phagemid, ribosome or suitable micro-organism (such as yeast), such as to facilitate screening. Suitable methods, techniques and host organisms for displaying and screening (a set, collection or library of) amino acid sequences will be clear to the person skilled in the art, for example on the basis of the further disclosure herein. Reference is also made to the review by Hoogenboom in Nature Biotechnology, 23, 9, 1105-1116 (2005).

[1471] In another aspect, the method for generating amino acid sequences comprises at least the steps of:
[1472] a) providing a collection or sample of cells expressing amino acid sequences;
[1473] b) screening said collection or sample of cells for cells that express an amino acid sequence that can bind to and/or have affinity for heterodimeric cytokines and/or their receptors;
   [1474] and
[1475] c) either (i) isolating said amino acid sequence; or (ii) isolating from said cell a nucleic acid sequence that encodes said amino acid sequence, followed by expressing said amino acid sequence.

[1476] For example, when the desired amino acid sequence is an immunoglobulin sequence, the collection or sample of cells may for example be a collection or sample of B-cells. Also, in this method, the sample of cells may be derived from a mammal that has been suitably immunized with heterodimeric cytokines and/or their receptors or with a suitable antigenic determinant based thereon or derived therefrom, such as an antigenic part, fragment, region, domain, loop or other epitope thereof. In one particular aspect, said antigenic determinant may be an extracellular part, region, domain, loop or other extracellular epitope(s).

[1477] The above method may be performed in any suitable manner, as will be clear to the skilled person. Reference is for example made to EP 0 542 810, WO 05/19824, WO 04/051268 and WO 04/106377. The screening of step b) is preferably performed using a flow cytometry technique such as FACS. For this, reference is for example made to Lieby et al., Blood, Vol. 97, No. 12, 3820 (2001).

[1478] In another aspect, the method for generating an amino acid sequence directed against heterodimeric cytokines and/or their receptors may comprise at least the steps of:
[1479] a) providing a set, collection or library of nucleic acid sequences encoding amino acid sequences;
[1480] b) screening said set, collection or library of nucleic acid sequences for nucleic acid sequences that encode an amino acid sequence that can bind to and/or has affinity for heterodimeric cytokines and/or their receptors;
   [1481] and
[1482] c) isolating said nucleic acid sequence, followed by expressing said amino acid sequence.

[1483] In such a method, the set, collection or library of nucleic acid sequences encoding amino acid sequences may for example be a set, collection or library of nucleic acid sequences encoding a naïve set, collection or library of immunoglobulin sequences; a set, collection or library of nucleic acid sequences encoding a synthetic or semi-synthetic set, collection or library of immunoglobulin sequences; and/or a set, collection or library of nucleic acid sequences encoding a set, collection or library of immunoglobulin sequences that have been subjected to affinity maturation.

[1484] Also, in such a method, the set, collection or library of nucleic acid sequences may encode a set, collection or library of heavy chain variable domains (such as V_{H} domains or V_{HH} domains) or of light chain variable domains. For example, the set, collection or library of nucleic acid sequences may encode a set, collection or library of domain antibodies or single domain antibodies, or a set, collection or library of amino acid sequences that are capable of functioning as a domain antibody or single domain antibody.

[1485] In a preferred aspect of this method, the set, collection or library of amino acid sequences may be an immune set, collection or library of nucleic acid sequences, for example derived from a mammal that has been suitably immunized with heterodimeric cytokines and/or their receptors or with a suitable antigenic determinant based thereon or derived therefrom, such as an antigenic part, fragment, region, domain, loop or other epitope thereof.

[1486] In one particular aspect, said antigenic determinant may be an extracellular part, region, domain, loop or other extracellular epitope(s).

[1487] The set, collection or library of nucleic acid sequences may for example encode an immune set, collection or library of heavy chain variable domains or of light chain variable domains. In one specific aspect, the set, collection or library of nucleotide sequences may encode a set, collection or library of V_{HH} sequences.

[1488] In the above methods, the set, collection or library of nucleotide sequences may be displayed on a phage, phagemid, ribosome or suitable micro-organism (such as yeast), such as to facilitate screening. Suitable methods, techniques and host organisms for displaying and screening (a set, collection or library of) nucleotide sequences encoding amino acid sequences will be clear to the person skilled in the art, for example on the basis of the further disclosure herein. Reference is also made to the review by Hoogenboom in Nature Biotechnology, 23, 9, 1105-1116 (2005).

[1489] The invention also relates to amino acid sequences that are obtained by the above methods, or alternatively by a method that comprises the one of the above methods and in addition at least the steps of determining the nucleotide sequence or amino acid sequence of said immunoglobulin sequence; and of expressing or synthesizing said amino acid sequence in a manner known per se, such as by expression in a suitable host cell or host organism or by chemical synthesis.

[1490] Also, following the steps above, one or more amino acid sequences of the invention may be suitably humanized (or alternatively camelized); and/or the amino acid sequence(s) thus obtained may be linked to each other or to one or more other suitable amino acid sequences (optionally via one or more suitable linkers) so as to provide a polypeptide of the invention. Also, a nucleic acid sequence encoding an amino acid sequence of the invention may be suitably humanized (or alternatively camelized) and suitably expressed; and/or one or more nucleic acid sequences encoding an amino acid sequence of the invention may be linked to each other or to one or more nucleic acid sequences that encode other suitable amino acid sequences (optionally via nucleotide sequences that encode one or more suitable linkers), after which the nucleotide sequence thus obtained may be suitably expressed so as to provide a polypeptide of the invention.

[1491] The invention further relates to applications and uses of the amino acid sequences, polypeptides, nucleic acids, host cells, products and compositions described herein, as well as to methods for the prevention and/or treatment for diseases and disorders associated with heterodimeric cytokines and/or their receptors. Some preferred but non-limiting applications and uses will become clear from the further description herein.

[1492] Some specific, preferred, but non-limiting aspects of the invention relate to:
[1493] 1. A protein or polypeptide, comprising at least one amino acid sequence that is directed against the p19 subunit and at least one amino acid sequence that is directed against the p40 subunit, optionally linked via a suitable linker, and optionally comprising one or more further amino acid sequences, binding domains and/or binding units.
[1494] 2. A protein or polypeptide according to aspect 1, in which the amino acid sequence that is directed against the p19 subunit is a p19+ sequence (i.e. an amino acid sequence that is capable of modulating, neutralizing, blocking and/or inhibiting the binding of a heterodimeric cytokine comprising a p19 subunit to its receptor), and in which the amino acid sequence that is directed against the p40 subunit is a p40+ sequence (i.e. an amino acid sequence that is capable of modulating, neutralizing, blocking and/or inhibiting the binding of a heterodimeric cytokine comprising a p40 subunit to its receptor).
[1495] 3. A protein or polypeptide according to aspect 1, in which the amino acid sequence that is directed against the p19 subunit is a p19+ sequence (i.e. an amino acid sequence that is capable of modulating, neutralizing, blocking and/or inhibiting the binding of a heterodimeric cytokine comprising a p19 subunit to its receptor), and in which the amino acid sequence that is directed against the p40 subunit is a p40− sequence (i.e. an amino acid sequence that is essentially not capable of modulating, neutralizing, blocking and/or inhibiting the binding of a heterodimeric cytokine comprising a p40 subunit to its receptor).
[1496] 4. A protein or polypeptide according to aspect 1, in which the amino acid sequence that is directed against the p19 subunit is a p19+ sequence (i.e. an amino acid sequence that is essentially not capable of modulating, neutralizing, blocking and/or inhibiting the binding of a heterodimeric cytokine comprising a p19 subunit to its receptor), and in which the amino acid sequence that is directed against the p40 subunit is a p40+ sequence (i.e. an amino acid sequence that is capable of modulating, neutralizing, blocking and/or inhibiting the binding of a heterodimeric cytokine comprising a p40 subunit to its receptor).

[1497] 5. A protein or polypeptide, comprising at least one amino acid sequence that is directed against the p35 subunit and at least one amino acid sequence that is directed against the p40 subunit, optionally linked via a suitable linker, and optionally comprising one or more further amino acid sequences, binding domains and/or binding units.
[1498] 6. A protein or polypeptide, comprising at least one amino acid sequence that is directed against a first epitope or antigenic determinant on the p19 subunit and at least one further amino acid sequence that is directed against a second epitope or antigenic determinant on the p19 subunit different from the first, optionally linked via a suitable linker, and optionally comprising one or more further amino acid sequences, binding domains and/or binding units.
[1499] 7. A protein or polypeptide according to aspect 6, in which the first amino acid sequence is a p19+ sequence (i.e. an amino acid sequence that is essentially not capable of modulating, neutralizing, blocking and/or inhibiting the binding of a heterodimeric cytokine comprising a p19 subunit to its receptor), and in which the second amino acid sequence is a p19− sequence (i.e. an amino acid sequence that is essentially not capable of modulating, neutralizing, blocking and/or inhibiting the binding of a heterodimeric cytokine comprising a p19 subunit to its receptor).
[1500] 8. A protein or polypeptide, comprising at least one amino acid sequence that is directed against a first epitope or antigenic determinant on the p40 subunit and at least one further amino acid sequence that is directed against a second epitope or antigenic determinant on the p40 subunit different from the first, optionally linked via a suitable linker, and optionally comprising one or more further amino acid sequences, binding domains and/or binding units.
[1501] 9. A protein or polypeptide, in which the first amino acid sequence is a p40+ sequence (i.e. an amino acid sequence that is essentially not capable of modulating, neutralizing, blocking and/or inhibiting the binding of a heterodimeric cytokine comprising a p40 subunit to its receptor), and in which the second amino acid sequence is a p40− sequence (i.e. an amino acid sequence that is essentially not capable of modulating, neutralizing, blocking and/or inhibiting the binding of a heterodimeric cytokine comprising a p40 subunit to its receptor).
[1502] 10. A protein or polypeptide according to any of aspects 1 to 9, in which each amino acid sequence that is comprised within said protein or polypeptide and that is directed against a subunit forms and/or essentially consist of a single (antigen) binding domain or binding unit, and/or is capable of forming and/or of functioning as a single (antigen) binding domain or binding unit (optionally after suitable folding).
[1503] 11. A protein or polypeptide according to any of aspects 1 to 10, in which each amino acid sequence that is comprised within said protein or polypeptide and that is directed against a subunit comprises an immunoglobulin fold or is capable of, under suitable conditions, forming an immunoglobulin fold.
[1504] 12. A protein or polypeptide according to any of aspects 1 to 11, in which each amino acid sequence that is comprised within said protein or polypeptide and that is directed against a subunit essentially consist of 4 framework regions (FR1 to FR4 respectively) and 3 complementarity determining regions.
[1505] 13. A protein or polypeptide according to any of aspects 1 to 12, in which each amino acid sequence that is comprised within said protein or polypeptide and that is directed against a subunit is a domain antibody (or an amino acid sequence that is suitable for use as a domain antibody), a single domain antibody (or an amino acid sequence that is suitable for use as a single domain antibody), a “dAb” (or an amino acid sequence that is suitable for use as a dAb) or a Nanobody™ (including but not limited to a VHH sequence) or another single variable domain, or any suitable fragment of any one thereof.
[1506] 14. A protein or polypeptide that is directed against a heterodimeric protein, polypeptide, ligand or receptor that comprises:
   [1507] at least a first subunit;
   [1508] and
   [1509] at least a second subunit;
   [1510] wherein said protein or polypeptide at least comprises a first binding domain or binding unit that is directed against said first subunit and a second binding domain or binding unit that is directed against said second subunit.
[1511] 15. A protein or polypeptide that is directed against a first heterodimeric protein, polypeptide, ligand or receptor that comprises:
   [1512] at least a first subunit that is shared between said first heterodimeric protein, polypeptide, ligand or receptor and at least a second, different heterodimeric protein, polypeptide, ligand or receptor;
   [1513] and
   [1514] at least a second subunit that is not shared between said first heterodimeric protein, polypeptide, ligand or receptor and said second, different heterodimeric protein, polypeptide, ligand or receptor;
   [1515] wherein said protein or polypeptide at least comprises a first binding domain or binding unit that is directed against said first (i.e. shared) subunit and a second binding domain or binding unit that is directed against said second (i.e. not shared) subunit.
[1516] 16. A protein or polypeptide that is directed against a first heterodimeric protein, polypeptide, ligand or receptor that comprises:
   [1517] at least a first subunit;
   [1518] and
   [1519] at least a second subunit;
   [1520] wherein said protein or polypeptide at least comprises a first binding domain or binding unit that is directed against said first subunit and a second binding domain or binding unit different from said first binding domain or binding unit that is also directed against said first subunit, but against a different epitope, antigenic determinant or binding site on said first subunit.
[1521] 17. A protein or polypeptide according to aspect 15 or 16, which is directed against a ligand for a receptor, and which comprises at least one binding domain or binding unit that is capable of modulating, neutralizing, blocking and/or inhibiting the binding of the ligand to its (cognate) receptor and at least one binding domain or binding unit that is essentially not capable of modulating, neutralizing, blocking and/or inhibiting the binding of the ligand to its (cognate) receptor.
[1522] 18. A protein or polypeptide according to aspect 15, which is directed against a ligand for a receptor, in which both the first binding domain or binding unit as well as the second binding domain or binding unit are capable of modulating, neutralizing, blocking and/or inhibiting the binding of the ligand to its (cognate) receptor.
[1523] 19. A protein or polypeptide according to any of aspects 14 to 18, in which each binding domain or binding unit comprises an immunoglobulin fold or is capable of, under suitable conditions, forming an immunoglobulin fold.
[1524] 20. A protein or polypeptide according to any of aspects 14 to 19, in which each binding domain or binding unit essentially consist of 4 framework regions (FR1 to FR4 respectively) and 3 complementarity determining regions.
[1525] 21. A protein or polypeptide according to any of aspects 14 to 20, in which each binding domain or binding unit is a domain antibody (or an amino acid sequence that is suitable for use as a domain antibody), a single domain antibody (or an amino acid sequence that is suitable for use as a single domain antibody), a “dAb” (or an amino acid sequence that is suitable for use as a dAb) or a Nanobody™ (including but not limited to a VHH sequence) or another single variable domain, or any suitable fragment of any one thereof.
[1526] 22. A nucleotide sequence or nucleic acid encoding a protein or polypeptide according to any of aspects 1 to 21.
[1527] 23. A composition comprising at least one protein or polypeptide according to any of aspects 1 to 21 or a nucleotide sequence or nucleic acid according to aspect 22.
[1528] 24. A pharmaceutical composition comprising at least one protein or polypeptide according to any of aspects 1 to 21 and at least one pharmaceutically acceptable carrier, diluent or excipient and/or adjuvant.
[1529] 25. The use of (a nucleotide sequence and/or nucleic acid that encodes) a p19+ sequence in providing, constructing, and/or as part of (a nucleotide sequence and/or nucleic acid that encodes) a multivalent, multispecific and/or multiparatopic construct, protein and/or polypeptide that comprises said p19+ sequence (one or more) and one or more further binding domains or binding units.
[1530] 26. The use of (a nucleotide sequence and/or nucleic acid that encodes) a p19− sequence in providing, constructing, and/or as part of (a nucleotide sequence and/or nucleic acid that encodes) a multivalent, multispecific and/or multiparatopic construct, protein and/or polypeptide that comprises said p19— sequence (one or more) and one or more further binding domains or binding units.
[1531] 27. The use of (a nucleotide sequence and/or nucleic acid that encodes) a p40− sequence in providing, constructing, and/or as part of (a nucleotide sequence and/or nucleic acid that encodes) a multivalent, multispecific and/or multiparatopic construct, protein and/or polypeptide that comprises said p40− sequence (one or more) and one or more further binding domains or binding units.
[1532] 28. The use of (a nucleotide sequence and/or nucleic acid that encodes) a p40+ sequence in providing, constructing, and/or as part of (a nucleotide sequence and/or nucleic acid that encodes) a multivalent, multispecific and/or multiparatopic construct, protein and/or polypeptide that comprises said p40+ sequence (one or more) and one or more further binding domains or binding units.
[1533] 29. The use of (a nucleotide sequence and/or nucleic acid that encodes) a p35 sequence in providing, constructing, and/or as part of (a nucleotide sequence and/or nucleic acid that encodes) a multivalent, multispecific and/or multiparatopic construct, protein and/or polypeptide that comprises said p35 sequence (one or more) and one or more further binding domains or binding units.
[1534] 30. The use according to any of aspects 25 to 29, in which the multivalent, multispecific and/or multiparatopic construct, protein and/or polypeptide is directed against a heterodimeric cytokine.
[1535] 31. The use according to any of aspects 25 to 30, in which the construct, protein and/or polypeptide is a biparatopic construct, protein and/or polypeptide that is directed against one subunit of the heterodimeric cytokine.
[1536] 32. The use according to any of aspects 30 and 31, in which the construct, protein and/or polypeptide is a multispecific construct, protein and/or polypeptide comprising at least one binding domain or binding unit that is directed against a first subunit of said heterodimeric cytokine and at least one binding domain or binding unit that is directed against a second subunit of said heterodimeric cytokine.
[1537] 33. The use according to any of aspects 30 to 32, in which the construct, protein and/or polypeptide comprises at least one least one binding domain or binding unit that is capable of modulating, neutralizing, blocking and/or inhibiting the binding of the heterodimeric cytokine to its (cognate) receptor.
[1538] 34. The use of (a nucleotide sequence and/or nucleic acid that encodes) an amino acid sequence that comprises or essentially consists of a single binding domain or binding unit in providing, constructing, and/or as part of (a nucleotide sequence and/or nucleic acid that encodes) a multispecific construct, protein and/or polypeptide that is directed against a heterodimeric protein, polypeptide, ligand or receptor, wherein said construct, protein and/or polypeptide comprises said amino acid sequence (one or more) and at least one further binding domain or binding unit, and wherein said one or more amino acid sequences are directed against a first subunit of the heterodimeric protein, polypeptide, ligand or receptor and at least one of said further binding domains or binding units is directed against a second subunit of the heterodimeric protein, polypeptide, ligand or receptor different from the first subunit.
[1539] 35. The use according to aspect 34, in which the construct, protein and/or polypeptide is a directed against a heterodimeric cytokine or against a heterodimeric receptor for a heterodimeric cytokine.
[1540] 36. The use of (a nucleotide sequence and/or nucleic acid that encodes) an amino acid sequence that comprises or essentially consists of a single binding domain or binding unit in providing, constructing, and/or as part of (a nucleotide sequence and/or nucleic acid that encodes) a biparatopic construct, protein and/or polypeptide that is directed against a heterodimeric protein, polypeptide, ligand or receptor, wherein said construct, protein and/or polypeptide comprises said amino acid sequence (one or more) and at least one further binding domain or binding unit, and wherein said one or more amino acid sequences are directed against a first subunit of the heterodimeric protein, polypeptide, ligand or receptor and at least one of said further binding domains or binding units is also directed against said first subunit, but to a different epitope or antigenic determinant on sais subunit.
[1541] 37. The use according to aspect 36, in which the construct, protein and/or polypeptide is directed against a ligand for a receptor and comprises at least one binding domain or binding unit that is capable of modulating, neutralizing, blocking and/or inhibiting the binding of the ligand to its (cognate) receptor and at least one binding domain or binding unit that is essentially not capable of modulating, neutralizing, blocking and/or inhibiting the binding of the ligand to its (cognate) receptor.

[1542] Also, all the amino acid sequences of the invention (such as (single) domain antibodies and/or Nanobodies), constructs, polypeptides and proteins described herein (in all their various and/or preferred aspects), preferably have 1050 values as follows:
[1543] when the amino acid sequence of the invention, protein or polypeptide is a monovalent amino acid sequence (as described herein) that is directed against p19 and that is a p19+ sequence, an IC50 value in the assay described in Example 25 (using human IL-23 at 19 pM) of less than 100 nM, more preferably less than 50 nM, even more preferably less than 10 nM, such as less than 1 nM (for example, in the picomolar range);
[1544] when the amino acid sequence of the invention, protein or polypeptide is a monovalent amino acid sequence (as described herein) that is directed against p40 and that is a p40+ sequence, an 1050 value in the assay described in Example 25 (using human IL-23 at 19 pM) and/or in the assay described in Example 27 (using human IL-12 at 1 pM) of less than 100 nM, more preferably less than 50 nM, even more preferably less than 10 nM, such as less than 1 nM (for example, in the picomolar range);
[1545] when the amino acid sequence of the invention, protein or polypeptide is a multivalent, multispecific and/or biparatopic construct that is directed against IL-23, and IC50 value in the assay described in Example 25 (using human IL-23 at 19 pM) of less than 10 nM, more preferably less than 1 nM, even more preferably less than 500 pM, such as less than 100 pM (for example, in the 1-50 picomolar range);
[1546] when the amino acid sequence of the invention, protein or polypeptide is a multivalent, multispecific and/or biparatopic construct that is directed against IL-12, and 1050 value in the assay described in Example 27 (using human IL-12 at 1 pM) of less than 10 nM, more preferably less than 1 nM, even more preferably less than 500 pM, such as less than 100 pM (for example, in the 1-50 picomolar range).

[1547] Other aspects, embodiments, advantages and applications of the invention will also become clear from the further description herein, in which the invention will be described and discussed in more detail with reference to the Nanobodies of the invention and polypeptides of the invention comprising the same, which form some of the preferred aspects of the invention.

[1548] As will become clear from the further description herein, Nanobodies generally offer certain advantages (outlined herein) compared to “dAb's” or similar (single) domain antibodies or immunoglobulin sequences, which advantages are also provided by the Nanobodies of the invention. However, it will be clear to the skilled person that the more general aspects of the teaching below can also be applied (either directly or analogously) to other amino acid sequences of the invention.

### DETAILED DESCRIPTION OF THE INVENTION

[1549] In the present description, examples and claims:
[1550] a) Unless indicated or defined otherwise, all terms used have their usual meaning in the art, which will be clear to the skilled person. Reference is for example made to the standard handbooks, such as Sambrook et al, “Molecular Cloning: A Laboratory Manual” (2nd. Ed.), Vols. 1-3, Cold Spring Harbor Laboratory Press (1989); F. Ausubel et al, eds., “Current protocols in molecular biology”, Green Publishing and Wiley Interscience, New York (1987); Lewin, “Genes II”, John Wiley & Sons, New York, N.Y., (1985); Old et al., “Principles of Gene Manipulation: An Introduction to Genetic Engineering”, 2nd edition, University of California Press, Berkeley, Calif. (1981); Roitt et al., “Immunology” (6th. Ed.), Mosby/Elsevier, Edinburgh (2001); Roitt et al., Roitt's Essential Immunology, 10^{th} Ed. Blackwell Publishing, UK (2001); and Janeway et al., “Immunobiology” (6th Ed.), Garland Science Publishing/Churchill Livingstone, N.Y. (2005), as well as to the general background art cited herein;
[1551] b) Unless indicated otherwise, the term “immunoglobulin sequence”—whether used herein to refer to a heavy chain antibody or to a conventional 4-chain antibody—is used as a general term to include both the full-size antibody, the individual chains thereof, as well as all parts, domains or fragments thereof (including but not limited to antigen-binding domains or fragments such as V_{HH} domains or V_{H}/V_{L} domains, respectively). In addition, the term “sequence” as used herein (for example in terms like “immunoglobulin sequence”, “antibody sequence”, “variable domain sequence”, “V_{HH} sequence” or “protein sequence”), should generally be understood to include both the relevant amino acid sequence as well as nucleic acid sequences or nucleotide sequences encoding the same, unless the context requires a more limited interpretation;
[1552] c) Unless indicated otherwise, all methods, steps, techniques and manipulations that are not specifically described in detail can be performed and have been performed in a manner known per se, as will be clear to the skilled person. Reference is for example again made to the standard handbooks and the general background art mentioned herein and to the further references cited therein; as well as to for example the following reviews Presta, Adv. Drug Deliv. Rev. 2006, 58 (5-6): 640-56; Levin and Weiss, Mol. Biosyst. 2006, 2(1): 49-57; Irving et al., J. Immunol. Methods, 2001, 248(1-2), 31-45; Schmitz et al., Placenta, 2000, 21 Suppl. A, S106-12, Gonzales et al., Tumour Biol., 2005, 26(1), 31-43, which describe techniques for protein engineering, such as affinity maturation and other techniques for improving the specificity and other desired properties of proteins such as immunoglobulins.
[1553] d) Amino acid residues will be indicated according to the standard three-letter or one-letter amino acid code, as mentioned in Table A-3;

TABLE A-3
one-letter and three-letter amino acid code

| | | | |
|---|---|---|---|
| Nonpolar, | Alanine | Ala | A |
| uncharged | Valine | Val | V |
| (at pH 6.0-7.0)⁽³⁾ | Leucine | Leu | L |
| | Isoleucine | Ile | I |
| | Phenylalanine | Phe | F |
| | Methionine⁽¹⁾ | Met | M |
| | Tryptophan | Trp | W |
| | Proline | Pro | P |
| Polar, | Glycine⁽²⁾ | Gly | G |
| uncharged | Serine | Ser | S |
| (at pH 6.0-7.0) | Threonine | Thr | T |
| | Cysteine | Cys | C |
| | Asparagine | Asn | N |
| | Glutamine | Gln | Q |
| | Tyrosine | Tyr | Y |
| Polar, | Lysine | Lys | K |
| charged | Arginine | Arg | R |
| (at pH 6.0-7.0) | Histidine⁽⁴⁾ | His | H |
| | Aspartate | Asp | D |
| | Glutamate | Glu | E |

Notes:
⁽¹⁾Sometimes also considered to be a polar uncharged amino acid.
⁽²⁾Sometimes also considered to be a nonpolar uncharged amino acid.
⁽³⁾As will be clear to the skilled person, the fact that an amino acid residue is referred to in this Table as being either charged or uncharged at pH 6.0 to 7.0 does not reflect in any way on the charge said amino acid residue may have at a pH lower than 6.0 and/or at a pH higher than 7.0; the amino acid residues mentioned in the Table can be either charged and/or uncharged at such a higher or lower pH, as will be clear to the skilled person.
⁽⁴⁾As is known in the art, the charge of a His residue is greatly dependant upon even small shifts in pH, but a His residu can generally be considered essentially uncharged at a pH of about 6.5.

[1554] e) For the purposes of comparing two or more nucleotide sequences, the percentage of “sequence identity” between a first nucleotide sequence and a second nucleotide sequence may be calculated by dividing [the number of nucleotides in the first nucleotide sequence that are identical to the nucleotides at the corresponding positions in the second nucleotide sequence] by [the total number of nucleotides in the first nucleotide sequence] and multiplying by [100%], in which each deletion, insertion, substitution or addition of a nucleotide in the second nucleotide sequence—compared to the first nucleotide sequence—is considered as a difference at a single nucleotide (position).

[1555] Alternatively, the degree of sequence identity between two or more nucleotide sequences may be calculated using a known computer algorithm for sequence alignment such as NCBI Blast v2.0, using standard settings.

Some other techniques, computer algorithms and settings for determining the degree of sequence identity are for example described in WO 04/037999, EP 0 967 284, EP 1 085 089, WO 00/55318, WO 00/78972, WO 98/49185 and GB 2 357 768-A.

[1556] Usually, for the purpose of determining the percentage of “sequence identity” between two nucleotide sequences in accordance with the calculation method outlined hereinabove, the nucleotide sequence with the greatest number of nucleotides will be taken as the “first” nucleotide sequence, and the other nucleotide sequence will be taken as the “second” nucleotide sequence;
[1557] f) For the purposes of comparing two or more amino acid sequences, the percentage of “sequence identity” between a first amino acid sequence and a second amino acid sequence (also referred to herein as “amino acid identity”) may be calculated by dividing [the number of amino acid residues in the first amino acid sequence that are identical to the amino acid residues at the corresponding positions in the second amino acid sequence] by [the total number of amino acid residues in the first amino acid sequence] and multiplying by [100%], in which each deletion, insertion, substitution or addition of an amino acid residue in the second amino acid sequence—compared to the first amino acid sequence—is considered as a difference at a single amino acid residue (position), i.e. as an “amino acid difference” as defined herein.

[1558] Alternatively, the degree of sequence identity between two amino acid sequences may be calculated using a known computer algorithm, such as those mentioned above for determining the degree of sequence identity for nucleotide sequences, again using standard settings.

[1559] Usually, for the purpose of determining the percentage of “sequence identity” between two amino acid sequences in accordance with the calculation method outlined hereinabove, the amino acid sequence with the greatest number of amino acid residues will be taken as the “first” amino acid sequence, and the other amino acid sequence will be taken as the “second” amino acid sequence.

[1560] Also, in determining the degree of sequence identity between two amino acid sequences, the skilled person may take into account so-called “conservative” amino acid substitutions, which can generally be described as amino acid substitutions in which an amino acid residue is replaced with another amino acid residue of similar chemical structure and which has little or essentially no influence on the function, activity or other biological properties of the polypeptide. Such conservative amino acid substitutions are well known in the art, for example from WO 04/037999, GB-A-4 357 768, WO 98/49185, WO 00/46383 and WO 01/09300; and (preferred) types and/or combinations of such substitutions may be selected on the basis of the pertinent teachings from WO 04/037999 as well as WO 98/49185 and from the further references cited therein.

[1561] Such conservative substitutions preferably are substitutions in which one amino acid within the following groups (a)-(e) is substituted by another amino acid residue within the same group: (a) small aliphatic, nonpolar or slightly polar residues: Ala, Ser, Thr, Pro and Gly; (b) polar, negatively charged residues and their (uncharged) amides: Asp, Asn, Glu and Gln; (c) polar, positively charged residues: His, Arg and Lys; (d) large aliphatic, nonpolar residues: Met, Leu, Ile, Val and Cys; and (e) aromatic residues: Phe, Tyr and Trp.

[1562] Particularly preferred conservative substitutions are as follows: Ala into Gly or into Ser; Arg into Lys; Asn into Gin or into His; Asp into Glu; Cys into Ser; Gln into Asn; Glu into Asp; Gly into Ala or into Pro; His into Asn or into Gin; Ile into Leu or into Val; Leu into Ile or into Val; Lys into Arg, into Gln or into Glu; Met into Leu, into Tyr or into Ile; Phe into Met, into Leu or into Tyr; Ser into Thr; Thr into Ser; Trp into Tyr; Tyr into Trp; and/or Phe into Val, into Ile or into Leu.

[1563] Any amino acid substitutions applied to the polypeptides described herein may also be based on the analysis of the frequencies of amino acid variations between homologous proteins of different species developed by Schulz et al., Principles of Protein Structure, Springer-Verlag, 1978, on the analyses of structure forming potentials developed by Chou and Fasman, Biochemistry 13: 211, 1974 and Adv. Enzymol., 47: 45-149, 1978, and on the analysis of hydrophobicity patterns in proteins developed by Eisenberg et al., Proc. Nad. Acad Sci. USA 81: 140-144, 1984; Kyte & Doolittle; J Molec. Biol. 157: 105-132, 198 1, and Goldman et al., Ann. Rev. Biophys. Chem. 15: 321-353, 1986, all incorporated herein in their entirety by reference. Information on the primary, secondary and tertiary structure of Nanobodies is given in the description herein and in the general background art cited above. Also, for this purpose, the crystal structure of a V_{HH} domain from a llama is for example given by Desmyter et al., Nature Structural Biology, Vol. 3, 9, 803 (1996); Spinelli et al., Natural Structural Biology (1996); 3, 752-757; and Decanniere et al., Structure, Vol. 7, 4, 361 (1999). Further information about some of the amino acid residues that in conventional V_{H} domains form the V_{H}/V_{L} interface and potential camelizing substitutions on these positions can be found in the prior art cited above.
[1564] g) Amino acid sequences and nucleic acid sequences are said to be “exactly the same” if they have 100% sequence identity (as defined herein) over their entire length;
[1565] h) When comparing two amino acid sequences, the term “amino acid difference” refers to an insertion, deletion or substitution of a single amino acid residue on a position of the first sequence, compared to the second sequence; it being understood that two amino acid sequences can contain one, two or more such amino acid differences;
[1566] i) When a nucleotide sequence or amino acid sequence is said to “comprise” another nucleotide sequence or amino acid sequence, respectively, or to “essentially consist of” another nucleotide sequence or amino acid sequence, this may mean that the latter nucleotide sequence or amino acid sequence has been incorporated into the firstmentioned nucleotide sequence or amino acid sequence, respectively, but more usually this generally means that the firstmentioned nucleotide sequence or amino acid sequence comprises within its sequence a stretch of nucleotides or amino acid residues, respectively, that has the same nucleotide sequence or amino acid sequence, respectively, as the latter sequence, irrespective of how the firstmentioned sequence has actually been generated or obtained (which may for example be by any suitable method described herein). By means of a non-limiting example, when a Nanobody of the invention is said to comprise a CDR sequence, this may mean that said CDR sequence has been incorporated into the Nanobody of the invention, but more usually this generally means that the Nanobody of the invention contains within its sequence a stretch of amino acid residues with the same amino acid sequence as said CDR sequence, irrespective of how said Nanobody of the invention has been generated or obtained. It should also be noted that when the latter amino acid sequence has a specific biological or structural function, it preferably has essentially the same, a similar or an equivalent biological or structural function in the firstmentioned amino acid sequence (in other words, the firstmentioned amino acid sequence is preferably such that the latter sequence is capable of performing essentially the same, a similar or an equivalent biological or structural function). For example, when a Nanobody of the invention is said to comprise a CDR sequence or framework sequence, respectively, the CDR sequence and framework are preferably capable, in said Nanobody, of functioning as a CDR sequence or framework sequence, respectively. Also, when a nucleotide sequence is said to comprise another nucleotide sequence, the firstmentioned nucleotide sequence is preferably such that, when it is expressed into an expression product (e.g. a polypeptide), the amino acid sequence encoded by the latter nucleotide sequence forms part of said expression product (in other words, that the latter nucleotide sequence is in the same reading frame as the firstmentioned, larger nucleotide sequence).
[1567] j) A nucleic acid sequence or amino acid sequence is considered to be “(in) essentially isolated (form)”—for example, compared to its native biological source and/or the reaction medium or cultivation medium from which it has been obtained—when it has been separated from at least one other component with which it is usually associated in said source or medium, such as another nucleic acid, another protein/polypeptide, another biological component or macromolecule or at least one contaminant, impurity or minor component. In particular, a nucleic acid sequence or amino acid sequence is considered “essentially isolated” when it has been purified at least 2-fold, in particular at least 10-fold, more in particular at least 100-fold, and up to 1000-fold or more. A nucleic acid sequence or amino acid sequence that is “in essentially isolated form” is preferably essentially homogeneous, as determined using a suitable technique, such as a suitable chromatographical technique, such as polyacrylamide-gel electrophoresis;
[1568] k) The term “domain” as used herein generally refers to a globular region of an amino acid sequence (such as an antibody chain, and in particular to a globular region of a heavy chain antibody), or to a polypeptide that essentially consists of such a globular region. Usually, such a domain will comprise peptide loops (for example 3 or 4 peptide loops) stabilized, for example, as a sheet or by disulfide bonds. The term “binding domain” refers to such a domain that is directed against an antigenic determinant (as defined herein);
[1569] l) The term “antigenic determinant” refers to the epitope on the antigen recognized by the antigen-binding molecule (such as a Nanobody or a polypeptide of the invention) and more in particular by the antigen-binding site of said molecule. The terms “antigenic determinant” and “epitope” may also be used interchangeably herein.
[1570] m) An amino acid sequence (such as a Nanobody, an antibody, a polypeptide of the invention, or generally an antigen binding protein or polypeptide or a fragment thereof) that can (specifically) bind to, that has affinity for and/or that has specificity for a specific antigenic determinant, epitope, antigen or protein (or for at least one part, fragment or epitope thereof) is said to be “against”, “directed against” or “directed to” said antigenic determinant, epitope, antigen or protein.
[1571] n) The term “specificity” refers to the number of different types of antigens or antigenic determinants to which a particular antigen-binding molecule or antigen-binding protein (such as a Nanobody or a polypeptide of the invention) molecule can bind. The specificity of an antigen-binding protein can be determined based on affinity and/or avidity. The affinity, represented by the equilibrium constant for the dissociation of an antigen with an antigen-binding protein (K_{D}), is a measure for the binding strength between an antigenic determinant and an antigen-binding site on the antigen-binding protein: the lesser the value of the K_{D}, the stronger the binding strength between an antigenic determinant and the antigen-binding molecule (alternatively, the affinity can also be expressed as the affinity constant (K_{A}), which is 1/K_{D}). As will be clear to the skilled person (for example on the basis of the further disclosure herein), affinity can be determined in a manner known per se, depending on the specific antigen of interest. Avidity is the measure of the strength of binding between an antigen-binding molecule (such as a Nanobody or polypeptide of the invention) and the pertinent antigen. Avidity is related to both the affinity between an antigenic determinant and its antigen binding site on the antigen-binding molecule and the number of pertinent binding sites present on the antigen-binding molecule. Typically, antigen-binding proteins (such as the amino acid sequences, Nanobodies and/or polypeptides of the invention) will bind to their antigen with a dissociation constant (K_{D}) of 10⁻⁵ to 10⁻¹² moles/liter or less, and preferably 10⁻⁷ to 10⁻¹² moles/liter or less and more preferably 10⁻⁸ to 10⁻¹² moles/liter (i.e. with an association constant (K_{A}) of 10⁵ to 10¹² liter/moles or more, and preferably 10⁷ to 10¹² liter/moles or more and more preferably 10⁸ to 10¹² liter/moles). Any K_{D} value greater than 10⁻⁴ mol/liter (or any K_{A} value lower than 10⁴ M⁻¹) liters/mol is generally considered to indicate non-specific binding. Preferably, a monovalent immunoglobulin sequence of the invention will bind to the desired antigen with an affinity less than 500 nM, preferably less than 200 nM, more preferably less than 10 nM, such as less than 500 pM. Specific binding of an antigen-binding protein to an antigen or antigenic determinant can be determined in any suitable manner known per se, including, for example, Scatchard analysis and/or competitive binding assays, such as radioimmunoassays (RIA), enzyme immunoassays (EIA) and sandwich competition assays, and the different variants thereof known per se in the art; as well as the other techniques mentioned herein.

[1572] The dissociation constant may be the actual or apparent dissociation constant, as will be clear to the skilled person. Methods for determining the dissociation constant will be clear to the skilled person, and for example include the techniques mentioned herein. In this respect, it will also be clear that it may not be possible to measure dissociation constants of more then 10⁻⁴ moles/liter or 10⁻³ moles/liter (e,g, of 10⁻² moles/liter). Optionally, as will also be clear to the skilled person, the (actual or apparent) dissociation constant may be calculated on the basis of the (actual or apparent) association constant (K_{A}), by means of the relationship [K_{D}=1/K_{A}].

[1573] The affinity denotes the strength or stability of a molecular interaction. The affinity is commonly given as by the K_{D}, or dissociation constant, which has units of mol/liter (or M). The affinity can also be expressed as an association constant, K_{A}, which equals 1/K_{D} and has units of (mol/liter)⁻¹ (or M⁻¹). In the present specification, the stability of the interaction between two molecules (such as an amino acid sequence, Nanobody or polypeptide of the invention and its intended target) will mainly be expressed in terms of the K_{D} value of their interaction; it being clear to the skilled person that in view of the relation K_{A}=1/K_{D}, specifying the strength of molecular interaction by its K_{D} value can also be used to calculate the corresponding K_{A} value. The K_{D}-value characterizes the strength of a molecular interaction also in a thermodynamic sense as it is related to the free energy (DO) of binding by the well known relation DG=RT.ln(K_{D}) (equivalently DG=−RT.ln(K_{A})), where R equals the gas constant, T equals the absolute temperature and In denotes the natural logarithm.

[1574] The K_{D} for biological interactions which are considered meaningful (e.g. specific) are typically in the range of 10⁻¹⁰M (0.1 nM) to 10⁻⁵M (10000 nM). The stronger an interaction is, the lower is its K_{D}.

[1575] The K_{D} can also be expressed as the ratio of the dissociation rate constant of a complex, denoted as k_{off}, to the rate of its association, denoted kₒₙ (so that K_{D}=k_{off}/kₒₙ and K_{A}=kₒₙ/k_{off}). The off-rate k_{off} has units s⁻¹ (where s is the SI unit notation of second). The on-rate kₒₙ has units M⁻¹s⁻¹. The on-rate may vary between 10² M⁻¹ s⁻¹ to about 10⁷ M⁻¹ s⁻¹, approaching the diffusion-limited association rate constant for bimolecular interactions. The off-rate is related to the half-life of a given molecular interaction by the relation t_{1/2}=ln(2)/k_{off} . The off-rate may vary between 10⁻⁶ s⁻¹ (near irreversible complex with a t_{1/2} of multiple days) to 1 s⁻¹ (t_{1/2}=0.69 s).

[1576] The affinity of a molecular interaction between two molecules can be measured via different techniques known per se, such as the well known surface plasmon resonance (SPR) biosensor technique (see for example Ober et al., Intern. Immunology, 13, 1551-1559, 2001) where one molecule is immobilized on the biosensor chip and the other molecule is passed over the immobilized molecule under flow conditions yielding kₒₙ, k_{off}measurements and hence K_{D} (or K_{A}) values. This can for example be performed using the well-known Biacore instruments (see for example Example 12 or 20),

[1577] It will also be clear to the skilled person that the measured K_{D} may correspond to the apparent K_{D} if the measuring process somehow influences the intrinsic binding affinity of the implied molecules for example by artefacts related to the coating on the biosensor of one molecule. Also, an apparent K_{D} may be measured if one molecule contains more than one recognition sites for the other molecule. In such situation the measured affinity may be affected by the avidity of the interaction by the two molecules.

[1578] Another approach that may be used to assess affinity is the 2-step ELISA (Enzyme-Linked Immunosorbent Assay) procedure of Friguet et al. (J. Immunol. Methods, 77, 305-19, 1985). This method establishes a solution phase binding equilibrium measurement and avoids possible artefacts relating to adsorption of one of the molecules on a support such as plastic.

[1579] However, the accurate measurement of K_{D} may be quite labor-intensive and as consequence, often apparent K_{D} values are determined to assess the binding strength of two molecules. It should be noted that as long all measurements are made in a consistent way (e.g. keeping the assay conditions unchanged) apparent K_{D} measurements can be used as an approximation of the true K_{D} and hence in the present document K_{D} and apparent K_{D} should be treated with equal importance or relevance.

[1580] Finally, it should be noted that in many situations the experienced scientist may judge it to be convenient to determine the binding affinity relative to some reference molecule. For example, to assess the binding strength between molecules A and B, one may e.g. use a reference molecule C that is known to bind to B and that is suitably labelled with a fluorophore or chromophore group or other chemical moiety, such as biotin for easy detection in an ELISA or FACS (Fluorescent activated cell sorting) or other format (the fluorophore for fluorescence detection, the chromophore for light absorption detection, the biotin for streptavidin-mediated ELISA detection). Typically, the reference molecule C is kept at a fixed concentration and the concentration of A is varied for a given concentration or amount of B. As a result an IC₅₀ value is obtained corresponding to the concentration of A at which the signal measured for C in absence of A is halved. Provided K_{D ref}, the K_{D} of the reference molecule, is known, as well as the total concentration c_{ref} of the reference molecule, the apparent K_{D} for the interaction A-B can be obtained from following formula: K_{D}=IC₅₀/(1+c_{ref}/K_{D ref}). Note that if c_{ref}<<K_{D ref}, K_{D}≈IC₅₀. Provided the measurement of the IC₅₀ is performed in a consistent way (e.g. keeping c_{ref} fixed) for the binders that are compared, the strength or stability of a molecular interaction can be assessed by the IC₅₀ and this measurement is judged as equivalent to K_{D} or to apparent K_{D} throughout this text.
[1581] o) The half-life of an amino acid sequence, compound or polypeptide of the invention can generally be defined as the time taken for the serum concentration of the amino acid sequence, compound or polypeptide to be reduced by 50%, in vivo, for example due to degradation of the sequence or compound and/or clearance or sequestration of the sequence or compound by natural mechanisms. The in vivo half-life of an amino acid sequence, compound or polypeptide of the invention can be determined in any manner known per se, such as by pharmacokinetic analysis. Suitable techniques will be clear to the person skilled in the art, and may for example generally involve the steps of suitably administering to a warm-blooded animal (i.e. to a human or to another suitable mammal, such as a mouse, rabbit, rat, pig, dog or a primate, for example monkeys from the genus Macaca (such as, and in particular, cynomologus monkeys (Macaca fascicularis) and/or rhesus monkeys (Macaca mulatta)) and baboon (Papio ursinus)) a suitable dose of the amino acid sequence, compound or polypeptide of the invention; collecting blood samples or other samples from said animal; determining the level or concentration of the amino acid sequence, compound or polypeptide of the invention in said blood sample; and calculating, from (a plot of) the data thus obtained, the time until the level or concentration of the amino acid sequence, compound or polypeptide of the invention has been reduced by 50% compared to the initial level upon dosing. Reference is for example made to the Experimental Part below, as well as to Dennis et al., J. Biol. Chem 277:35035-42 (2002), and to the standard handbooks, such as Kenneth, A et al: Chemical Stability of Pharmaceuticals: A Handbook for Pharmacists and Peters et al, Pharmacokinete analysis: A Practical Approach (1996). Reference is also made to “Pharmacokinetics”, M Gibaldi & D Perron, published by Marcel Dekker, 2nd Rev. edition (1982).

[1582] As will also be clear to the skilled person (see for example pages 6 and 7 of WO 04/003019 and in the further references cited therein), the half-life can be expressed using parameters such as the t1/2-alpha, t1/2-beta and the area under the curve (AUC). In the present specification, an “increase in half-life” refers to an increase in any one of these parameters, such as any two of these parameters, or essentially all three these parameters. As used herein “increase in half-life” or “increased half-life” in particular refers to an increase in the t1/2-beta, either with or without an increase in the t1/2-alpha and/or the AUC or both.

[1583] For example, the half-life of an amino acid sequence or polypeptide of the invention may be determined by means of a pharmacokinetic study, performed in a rodent or non-human primate model, as follows. Groups of animals (n=2-10) are given an intravenous bolus injection of 1 mg/kg or 10 mg/kg 2D3-17D12 fusion protein. Plasma samples are obtained via a vein at different timepoints after dosing (eg. 1, 2, 4, 6, 8, 12, 24, 48,144, 192, 240, 288 and 336 h after dosing) and analyzed for the presence of the 2D3-17D12 fusion protein by ELISA. Plasma concentration versus time are fitted to a two-compartment elimination model. The pharmacokinetic parameters of clearance, V1, steady state volume (Vss), T½; AUC, and AUC corrected for actual dose administered (AUC/dose) are averaged for each treatment group. Differences between groups are determined by analysis of variance.
[1584] p) In the context of the present invention, “modulating” or “to modulate” generally means either reducing or inhibiting the activity of, or alternatively increasing the activity of, a target or antigen, as measured using a suitable in vitro, cellular or in vivo assay. In particular, “modulating” or “to modulate” may mean either reducing or inhibiting the activity of, or alternatively increasing a (relevant or intended) biological activity of, a target or antigen, as measured using a suitable in vitro, cellular or in vivo assay (which will usually depend on the target or antigen involved), by at least 1%, preferably at least 5%, such as at least 10% or at least 25%, for example by at least 50%, at least 60%, at least 70%, at least 80%, or 90% or more, compared to activity of the target or antigen in the same assay under the same conditions but without the presence of the construct of the invention.

[1585] As will be clear to the skilled person, “modulating” may also involve effecting a change (which may either be an increase or a decrease) in affinity, avidity, specificity and/or selectivity of a target or antigen for one or more of its ligands, binding partners, partners for association into a homomultimeric or heteromultimeric form, or substrates; and/or effecting a change (which may either be an increase or a decrease) in the sensitivity of the target or antigen for one or more conditions in the medium or surroundings in which the target or antigen is present (such as pH, ion strength, the presence of co-factors, etc.), compared to the same conditions but without the presence of the construct of the invention. As will be clear to the skilled person, this may again be determined in any suitable manner and/or using any suitable assay known per se, depending on the target or antigen involved.

[1586] “Modulating” may also mean effecting a change (i.e. an activity as an agonist, as an antagonist or as a reverse agonist, respectively, depending on the target or antigen and the desired biological or physiological effect) with respect to one or more biological or physiological mechanisms, effects, responses, functions, pathways or activities in which the target or antigen (or in which its substrate(s), ligand(s) or pathway(s) are involved, such as its signalling pathway or metabolic pathway and their associated biological or physiological effects) is involved. Again, as will be clear to the skilled person, such an action as an agonist or an antagonist may be determined in any suitable manner and/or using any suitable (in vitro and usually cellular or in assay) assay known per se, depending on the target or antigen involved. In particular, an action as an agonist or antagonist may be such that an intended biological or physiological activity is increased or decreased, respectively, by at least 1%, preferably at least 5%, such as at least 10% or at least 25%, for example by at least 50%, at least 60%, at least 70%, at least 80%, or 90% or more, compared to the biological or physiological activity in the same assay under the same conditions but without the presence of the construct of the invention.

[1587] Modulating may for example also involve allosteric modulation of the target or antigen; and/or reducing or inhibiting the binding of the target or antigen to one of its substrates or ligands and/or competing with a natural ligand, substrate for binding to the target or antigen. Modulating may also involve activating the target or antigen or the mechanism or pathway in which it is involved. Modulating may for example also involve effecting a change in respect of the folding or confirmation of the target or antigen, or in respect of the ability of the target or antigen to fold, to change its confirmation (for example, upon binding of a ligand), to associate with other (sub)units, or to disassociate. Modulating may for example also involve effecting a change in the ability of the target or antigen to transport other compounds or to serve as a channel for other compounds (such as ions).

[1588] Modulating may be reversible or irreversible, but for pharmaceutical and pharmacological purposes will usually be in a reversible manner.
[1589] q) In respect of a target or antigen, the term “interaction site” on the target or antigen means a site, epitope, antigenic determinant, part, domain or stretch of amino acid residues on the target or antigen that is a site for binding to a ligand, receptor or other binding partner, a catalytic site, a cleavage site, a site for allosteric interaction, a site involved in multimerisation (such as homomerization or heterodimerization) of the target or antigen; or any other site, epitope, antigenic determinant, part, domain or stretch of amino acid residues on the target or antigen that is involved in a biological action or mechanism of the target or antigen. More generally, an “interaction site” can be any site, epitope, antigenic determinant, part, domain or stretch of amino acid residues on the target or antigen to which an amino acid sequence or polypeptide of the invention can bind such that the target or antigen (and/or any pathway, interaction, signalling, biological mechanism or biological effect in which the target or antigen is involved) is modulated (as defined herein).
[1590] r) An amino acid sequence or polypeptide is said to be “specific for” a first target or antigen compared to a second target or antigen when is binds to the first antigen with an affinity (as described above, and suitably expressed as a K_{D} value, K_{A} value, K_{off} rate and/or Kₒₙ rate) that is at least 10 times, such as at least 100 times, and preferably at least 1000 times, and up to 10.000 times or more better than the affinity with which said amino acid sequence or polypeptide binds to the second target or polypeptide. For example, the first antigen may bind to the target or antigen with a K_{D} value that is at least 10 times less, such as at least 100 times less, and preferably at least 1000 times less, such as 10.000 times less or even less than that, than the K_{D} with which said amino acid sequence or polypeptide binds to the second target or polypeptide. Preferably, when an amino acid sequence or polypeptide is “specific for” a first target or antigen compared to a second target or antigen, it is directed against (as defined herein) said first target or antigen, but not directed against said second target or antigen.
[1591] s) The terms “cross-block”, “cross-blocked” and “cross-blocking” are used interchangeably herein to mean the ability of an amino acid sequence or other binding agents (such as a polypeptide of the invention) to interfere with the binding of other amino acid sequences or binding agents of the invention to a given target. The extend to which an amino acid sequence or other binding agents of the invention is able to interfere with the binding of another to [target], and therefore whether it can be said to cross-block according to the invention, can be determined using competition binding assays. One particularly suitable quantitative assay uses a Biacore machine which can measure the extent of interactions using surface plasmon resonance technology. Another suitable quantitative cross-blocking assay uses an ELISA-based approach to measure competition between amino acid sequence or another binding agents in terms of their binding to the target.

[1592] The following generally describes a suitable Biacore assay for determining whether an amino acid sequence or other binding agent cross-blocks or is capable of cross-blocking according to the invention. It will be appreciated that the assay can be used with any of the amino acid sequence or other binding agents described herein. The Biacore machine (for example the Biacore 3000) is operated in line with the manufacturer's recommendations. Thus in one cross-blocking assay, the target protein is coupled to a CM5 Biacore chip using standard amine coupling chemistry to generate a surface that is coated with the target. Typically 200-800 resonance units of the target would be coupled to the chip (an amount that gives easily measurable levels of binding but that is readily saturable by the concentrations of test reagent being used). Two test amino acid sequences (termed A* and B*) to be assessed for their ability to cross-block each other are mixed at a one to one molar ratio of binding sites in a suitable buffer to create the test mixture. When calculating the concentrations on a binding site basis the molecular weight of an amino acid sequence is assumed to be the total molecular weight of the amino acid sequence divided by the number of target binding sites on that amino acid sequence. The concentration of each amino acid sequence in the test mix should be high enough to readily saturate the binding sites for that amino acid sequence on the target molecules captured on the Biacore chip. The amino acid sequences in the mixture are at the same molar concentration (on a binding basis) and that concentration would typically be between 1.00 and 1.5 micromolar (on a binding site basis). Separate solutions containing A* alone and B* alone are also prepared. A* and B* in these solutions should be in the same buffer and at the same concentration as in the test mix. The test mixture is passed over the target-coated. Biacore chip and the total amount of binding recorded. The chip is then treated in such a way as to remove the bound amino acid sequences without damaging the chip-bound target. Typically this is done by treating the chip with 30 mM HCl for 60 seconds. The solution of A* alone is then passed over the target-coated surface and the amount of binding recorded. The chip is again treated to remove all of the bound amino acid sequences without damaging the chip-bound target. The solution of B* alone is then passed over the target-coated surface and the amount of binding recorded. The maximum theoretical binding of the mixture of A* and B* is next calculated, and is the sum of the binding of each amino acid sequence when passed over the target surface alone. If the actual recorded binding of the mixture is less than this theoretical maximum then the two amino acid sequences are cross-blocking each other. Thus, in general, a cross-blocking amino acid sequence or other binding agent according to the invention is one which will bind to the target in the above Biacore cross-blocking assay such that during the assay and in the presence of a second amino acid sequence or other binding agent of the invention the recorded binding is between 80% and 0.1% (e.g. 80% to 4%) of the maximum theoretical binding, specifically between 75% and 0.1% (e.g. 75% to 4%) of the maximum theoretical binding, and more specifically between 70% and 0.1% (e.g. 70% to 4%) of maximum theoretical binding (as just defined above) of the two amino acid sequences or binding agents in combination. The Biacore assay described above is a primary assay used to determine if amino acid sequences or other binding agents cross-block each other according to the invention. On rare occasions particular amino acid sequences or other binding agents may not bind to target coupled via amine chemistry to a CM5 Biacore chip (this usually occurs when the relevant binding site on target is masked or destroyed by the coupling to the chip). In such cases cross-blocking can be determined using a tagged version of the target, for example a N-terminal His-tagged version. In this particular format, an anti-His amino acid sequence would be coupled to the Biacore chip and then the His-tagged target would be passed over the surface of the chip and captured by the anti-His amino acid sequence. The cross blocking analysis would be carried out essentially as described above, except that after each chip regeneration cycle, new His-tagged target would be loaded back onto the anti-His amino acid sequence coated surface. In addition to the example given using N-terminal His-tagged [target], C-terminal His-tagged target could alternatively be used. Furthermore, various other tags and tag binding protein combinations that are known in the art could be used for such a cross-blocking analysis (e.g. HA tag with anti-HA antibodies; FLAG tag with anti-FLAG antibodies; biotin tag with streptavidin).

[1593] The following generally describes an ELISA assay for determining whether an amino acid sequence or other binding agent directed against a target cross-blocks or is capable of cross-blocking as defined herein. It will be appreciated that the assay can be used with any of the amino acid sequences (or other binding agents such as polypeptides of the invention) described herein. The general principal of the assay is to have an amino acid sequence or binding agent that is directed against the target coated onto the wells of an ELISA plate. An excess amount of a second, potentially cross-blocking, anti-target amino acid sequence is added in solution (i.e. not bound to the ELISA plate). A limited amount of the target is then added to the wells. The coated amino acid sequence and the amino acid sequence in solution compete for binding of the limited number of target molecules. The plate is washed to remove excess target that has not been bound by the coated amino acid sequence and to also remove the second, solution phase amino acid sequence as well as any complexes formed between the second, solution phase amino acid sequence and target. The amount of bound target is then measured using a reagent that is appropriate to detect the target. An amino acid sequence in solution that is able to cross-block the coated amino acid sequence will be able to cause a decrease in the number of target molecules that the coated amino acid sequence can bind relative to the number of target molecules that the coated amino acid sequence can bind in the absence of the second, solution phase, amino acid sequence. In the instance where the first amino acid sequence, e.g. an Ab-X, is chosen to be the immobilized amino acid sequence, it is coated onto the wells of the ELISA plate, after which the plates are blocked with a suitable blocking solution to minimize non-specific binding of reagents that are subsequently added. An excess amount of the second amino acid sequence, i.e. Ab-Y, is then added to the ELISA plate such that the moles of Ab-Y [target] binding sites per well are at least 10 fold higher than the moles of Ab-X [target] binding sites that were used, per well, during the coating of the ELISA plate. [target] is then added such that the moles of [target] added per well are at least 25-fold lower than the moles of Ab-X [target] binding sites that were used for coating each well. Following a suitable incubation period the ELISA plate is washed and a reagent for detecting the target is added to measure the amount of target specifically bound by the coated anti-[target] amino acid sequence (in this case Ab-X). The background signal for the assay is defined as the signal obtained in wells with the coated amino acid sequence (in this case Ab-X), second solution phase amino acid sequence (in this case Ab-Y), [target] buffer only (i.e. no target) and target detection reagents. The positive control signal for the assay is defined as the signal obtained in wells with the coated amino acid sequence (in this case Ab-X), second solution phase amino acid sequence buffer only (i.e. no second solution phase amino acid sequence), target and target detection reagents. The ELISA assay may be run in such a manner so as to have the positive control signal be at least 6 times the background signal. To avoid any artefacts (e.g. significantly different affinities between Ab-X and Ab-Y for [target]) resulting from the choice of which amino acid sequence to use as the coating amino acid sequence and which to use as the second (competitor) amino acid sequence, the cross-blocking assay may to be run in two formats: 1) format 1 is where Ab-X is the amino acid sequence that is coated onto the ELISA plate and Ab-Y is the competitor amino acid sequence that is in solution and 2) format 2 is where Ab-Y is the amino acid sequence that is coated onto the ELISA plate and Ab-X is the competitor amino acid sequence that is in solution. Ab-X and Ab-Y are defined as cross-blocking if, either in format 1 or in format 2, the solution phase anti-target amino acid sequence is able to cause a reduction of between 60% and 100%, specifically between 70% and 100%, and more specifically between 80% and 100%, of the target detection signal {i.e. the amount of target bound by the coated amino acid sequence) as compared to the target detection signal obtained in the absence of the solution phase anti-target amino acid sequence (i.e. the positive control wells).
[1594] f) An amino acid sequence is said to be “cross-reactive” for two different antigens or antigenic determinants (such as serum albumin from two different species of mammal, such as human serum albumin and cyno serum albumin) if it is specific for (as defined herein) both these different antigens or antigenic determinants.
[1595] u) By binding that is “essentially independent of the pH” is generally meant herein that the association constant (K_{A}) of the amino acid sequence with respect to the serum protein (such as serum albumin) at the pH value(s) that occur in a cell of an animal or human body (as further described herein) is at least 5%, such as at least 10%, preferably at least 25%, more preferably at least 50%, even more preferably at least 60%, such as even more preferably at least 70%, such as at least 80% or 90% or more (or even more than 100%, such as more than 110%, more than 120% or even 130% or more, or even more than 150%, or even more than 200%) of the association constant (K_{A}) of the amino acid sequence with respect to the same serum protein at the pH value(s) that occur outside said cell. Alternatively, by binding that is “essentially independent of the pH” is generally meant herein that the k_{off} rate (measured by Biacore) of the amino acid sequence with respect to the serum protein (such as serum albumin) at the pH value(s) that occur in a cell of an animal or human body (as e.g. further described herein, e.g. pH around 5.5, e.g. 5.3 to 5.7) is at least 5%, such as at least 10%, preferably at least 25%, more preferably at least 50%, even more preferably at least 60%, such as even more preferably at least 70%, such as at least 80% or 90% or more (or even more than 100%, such as more than 110%, more than 120% or even 130% or more, or even more than 150%, or even more than 200%) of the k_{off} rate of the amino acid sequence with respect to the same serum protein at the pH value(s) that occur outside said cell, e.g. pH 7.2 to 7.4. By “the pH value(s) that occur in a cell of an animal or human body” is meant the pH value(s) that may occur inside a cell, and in particular inside a cell that is involved in the recycling of the serum protein. In particular, by “the pH value(s) that occur in a cell of an animal or human body” is meant the pH value(s) that may occur inside a (sub)cellular compartment or vesicle that is involved in recycling of the serum protein (e.g. as a result of pinocytosis, endocytosis, transcytosis, exocytosis and phagocytosis or a similar mechanism of uptake or internalization into said cell), such as an endosome, lysosome or pinosome.
[1596] v) As further described herein, the total number of amino acid residues in a Nanobody can be in the region of 110-120, is preferably 112-115, and is most preferably 113. It should however be noted that parts, fragments, analogs or derivatives (as further described herein) of a Nanobody are not particularly limited as to their length and/or size, as long as such parts, fragments, analogs or derivatives meet the further requirements outlined herein and are also preferably suitable for the purposes described herein;
[1597] w) The amino acid residues of a Nanobody are numbered according to the general numbering for V_{H} domains given by Kabat et al. (“Sequence of proteins of immunological interest”, US Public Health Services, NIH Bethesda, Md., Publication No. 91), as applied to V_{HH} domains from Camelids in the article of Riechmann and Muyldermans, J. Immunol. Methods 2000 Jun. 23; 240 (1-2): 185-195 (see for example FIG. 2 of this publication); or referred to herein. According to this numbering, FR1 of a Nanobody comprises the amino acid residues at positions 1-30, CDR1 of a Nanobody comprises the amino acid residues at positions 31-35, FR2 of a Nanobody comprises the amino acids at positions 36-49, CDR2 of a Nanobody comprises the amino acid residues at positions 50-65, FR3 of a Nanobody comprises the amino acid residues at positions 66-94, CDR3 of a Nanobody comprises the amino acid residues at positions 95-102, and FR4 of a Nanobody comprises the amino acid residues at positions 103-113. [In this respect, it should be noted that—as is well known in the art for V_{H} domains and for V_{HH} domains—the total number of amino acid residues in each of the CDR's may vary and may not correspond to the total number of amino acid residues indicated by the Kabat numbering (that is, one or more positions according to the Kabat numbering may not be occupied in the actual sequence, or the actual sequence may contain more amino acid residues than the number allowed for by the Kabat numbering). This means that, generally, the numbering according to Kabat may or may not correspond to the actual numbering of the amino acid residues in the actual sequence. Generally, however, it can be said that, according to the numbering of Kabat and irrespective of the number of amino acid residues in the CDR's, position 1 according to the Kabat numbering corresponds to the start of FR1 and vice versa, position 36 according to the Kabat numbering corresponds to the start of FR2 and vice versa, position 66 according to the Kabat numbering corresponds to the start of FR3 and vice versa, and position 103 according to the Kabat numbering corresponds to the start of FR4 and vice versa.].

[1598] Alternative methods for numbering the amino acid residues of V_{H} domains, which methods can also be applied in an analogous manner to V_{HH} domains from Camelids and to Nanobodies, are the method described by Chothia et al. (Nature 342, 877-883 (1989)), the so-called “AbM definition” and the so-called “contact definition”. However, in the present description, claims and figures, the numbering according to Kabat as applied to V_{HH} domains by Riechmann and Muyldermans will be followed, unless indicated otherwise; and
[1599] x) In respect of any amino acid sequence described herein that is a CDR sequence (such as any of the CDR sequences from the CDR1 Sequences Groups 2, 9, 16, 23, 30, 37, 44, 51 and/or 58 (see Table A-1); from the CDR2 Sequences Groups 4, 11, 18, 25, 32, 39, 46, 53, and/or 60 (see Table A-1); and/or from the CDR3 Sequences Groups 6, 13, 20, 27, 34, 41, 48, 54 and/or 62 (see Table A-1)), “Optional Condition I” means that when said amino acid sequence contains an amino acid substitution, such an amino acid substitution is preferably, and compared to the original amino acid sequence without said substitution, a conservative amino acid substitution (as defined herein): “Optional Condition II” means that said preferably only contains amino acid substitutions, and no amino acid deletions or insertions, compared to the original amino acid sequence without said substitution; “Optional Condition III” means that said amino acid sequence may be an amino acid sequence that is derived from the corresponding amino acid sequence by means of affinity maturation using one or more techniques of affinity maturation known per se.
[1600] y) In respect of any amino acid sequence described herein that is a framework sequence, “Optional Condition I” means that when said amino acid sequence contains an amino acid substitution, such an amino acid substitution is preferably, and compared to the original amino acid sequence without said substitution, a conservative amino acid substitution (as defined herein): “Optional Condition II” means that said preferably only contains amino acid substitutions, and no amino acid deletions or insertions, compared to the original amino acid sequence without said substitution; and “Optional Condition IV” means that where such an amino acid sequence contains any amino acid differences, these amino acid differences are preferably not present at one of the Hallmark Residues (although the presence of an amino acid difference at a position of a Hallmark Residue is not excluded, provided the favourable properties of a VHH or nanobody as described herein are essentially maintained or not affected to an extent that would make the resulting amino acid sequence no longer suitable for use as a single antigen binding domain or unit (for example, as a nanobody);
[1601] z) The Figures, Sequence Listing and the Experimental Part/Examples are only given to further illustrate the invention and should not be interpreted or construed as limiting the scope of the invention and/or of the appended claims in any way, unless explicitly indicated otherwise herein. Also, generally, the amino acid sequences and polypeptides of the invention that are explicitly referred to in the Experimental Part are preferred examples of amino acid sequences and polypeptides of the invention. Further preferences from within these amino acid sequences and polypeptides will become clear from the data presented in the Experimental Part,

[1602] For a general description of heavy chain antibodies and the variable domains thereof, reference is inter alia made to the prior art cited herein, to the review article by Muyldermans in Reviews in Molecular Biotechnology 74(2001), 277-302; as well as to the following patent applications, which are mentioned as general background art: WO 94/04678, WO 95/04079 and WO 96/34103 of the Vrije Universiteit Brussel; WO 94/25591, WO 99/37681, WO 00/40968, WO 00/43507, WO 00/65057, WO 01/40310, WO 01/44301, EP 1134231 and WO 02/48193 of Unilever; WO 97/49805, WO 01/21817, WO 03/035694, WO 03/054016 and WO 03/055527 of the Vlaams Instituut voor Biotechnologie (VIB); WO 03/050531 of Algonomics N.V. and Ablynx N.V.; WO 01/90190 by the National Research Council of Canada; WO 03/025020 (=EP 1 433 793) by the Institute of Antibodies; as well as WO 04/041867, WO 04/041862, WO 04/041865, WO 04/041863, WO 04/062551, WO 05/044858, WO 06/40153, WO 06/079372, WO 06/122786, WO 06/122787 and WO 06/122825, by Ablynx N.V. and the further published patent applications by Ablynx N.V. Reference is also made to the further prior art mentioned in these applications, and in particular to the list of references mentioned on pages 41-43 of the International application WO 06/040153, which list and references are incorporated herein by reference.

[1603] In accordance with the terminology used in the art (see the above references), the variable domains present in naturally occurring heavy chain antibodies will also be referred to as “V_{HH} domains”, in order to distinguish them from the heavy chain variable domains that are present in conventional 4-chain antibodies (which will be referred to hereinbelow as “V_{H} domains”) and from the light chain variable domains that are present in conventional 4-chain antibodies (which will be referred to hereinbelow as “V_{L} domains”).

[1604] As mentioned in the prior art referred to above, V_{HH} domains have a number of unique structural characteristics and functional properties which make isolated V_{HH} domains (as well as Nanobodies based thereon, which share these structural characteristics and functional properties with the naturally occurring V_{HH} domains) and proteins containing the same highly advantageous for use as functional antigen-binding domains or proteins. In particular, and without being limited thereto, V_{HH} domains (which have been “designed” by nature to functionally bind to an antigen without the presence of, and without any interaction with, a light chain variable domain) and Nanobodies can function as a single, relatively small, functional antigen-binding structural unit, domain or protein. This distinguishes the V_{HH} domains from the V_{H} and V_{L} domains of conventional 4-chain antibodies, which by themselves are generally not suited for practical application as single antigen-binding proteins or domains, but need to be combined in some form or another to provide a functional antigen-binding unit (as in for example conventional antibody fragments such as Fab fragments; in ScFv's fragments, which consist of a V_{H} domain covalently linked to a V_{L} domain).

[1605] Because of these unique properties, the use of V_{HH} domains and Nanobodies as single antigen-binding proteins or as antigen-binding domains (i.e. as part of a larger protein or polypeptide) offers a number of significant advantages over the use of conventional V_{H} and V_{L} domains, scFv's or conventional antibody fragments (such as Fab- or F(ab′)₂-fragments):
[1606] only a single domain is required to bind an antigen with high affinity and with high selectivity, so that there is no need to have two separate domains present, nor to assure that these two domains are present in the right spacial conformation and configuration (i.e. through the use of especially designed linkers, as with scFv's);
[1607] V_{HH} domains and Nanobodies can be expressed from a single gene and require no post-translational folding or modifications;
[1608] V_{HH} domains and Nanobodies can easily be engineered into multivalent and multispecific formats (as further discussed herein);
[1609] V_{HH} domains and Nanobodies are highly soluble and do not have a tendency to aggregate (as with the mouse-derived “dAb's” described by Ward et al., Nature, Vol. 341, 1989, p. 544);
[1610] V_{HH} domains and Nanobodies are highly stable to beat, pH, proteases and other denaturing agents or conditions (see for example Ewert et al, supra);
[1611] V_{HH} domains and Nanobodies are easy and relatively cheap to prepare, even on a scale required for production. For example, V_{HH} domains, Nanobodies and proteins/polypeptides containing the same can be produced using microbial fermentation (e.g. as further described below) and do not require the use of mammalian expression systems, as with for example conventional antibody fragments;
[1612] V_{HH} domains and Nanobodies are relatively small (approximately 15 kDa, or 10 times smaller than a conventional IgG) compared to conventional 4-chain antibodies and antigen-binding fragments thereof, and therefore show higher) penetration into tissues (including but not limited to solid tumors and other dense tissues) than such conventional 4-chain antibodies and antigen-binding fragments thereof;
[1613] V_{HH} domains and Nanobodies can show so-called cavity-binding properties (inter alia due to their extended CDR3 loop, compared to conventional V_{H} domains) and can therefore also access targets and epitopes not accessable to conventional 4-chain antibodies and antigen-binding fragments thereof. For example, it has been shown that V_{HH} domains and Nanobodies can inhibit enzymes (see for example WO 97/49805; Transue et al., Proteins 1998 Sep. 1; 32(4): 515-22; Lauwereys et al., EMBO J. 1998 Jul. 1; 17(13): 3512-20).

[1614] In a specific and preferred aspect, the invention provides Nanobodies against heterodimeric cytokines and/or their receptors, and in particular Nanobodies against heterodimeric cytokines and/or their receptors from a warm-blooded animal, and more in particular Nanobodies against heterodimeric cytokines and/or their receptors from a mammal, and especially Nanobodies against human heterodimeric cytokines and/or their receptors; as well as proteins and/or polypeptides comprising at least one such Nanobody.

[1615] In particular, the invention provides Nanobodies against heterodimeric cytokines and/or their receptors, and proteins and/or polypeptides comprising the same, that have improved therapeutic and/or pharmacological properties and/or other advantageous properties (such as, for example, improved ease of preparation and/or reduced costs of goods), compared to conventional antibodies against heterodimeric cytokines and/or their receptors or fragments thereof, compared to constructs that could be based on such conventional antibodies or antibody fragments (such as Fab′ fragments, F(ab′)₂ fragments, ScFv constructs, “diabodies” and other multispecific constructs (see for example the review by Holliger and Hudson, Nat Biotechnol. 2005 September; 23(9):1126-36)), and also compared to the so-called “dAb's” or similar (single) domain antibodies that may be derived from variable domains of conventional antibodies. These improved and advantageous properties will become clear from the further description herein, and for example include, without limitation, one or more of:
[1616] increased affinity and/or avidity for heterodimeric cytokines and/or their receptors, either in a monovalent format, in a multivalent format (for example in a bivalent format) and/or in a multispecific format (for example one of the multispecific formats described hereinbelow);
[1617] better suitability for formatting in a multivalent format (for example in a bivalent format);
[1618] better suitability for formatting in a multispecific format (for example one of the multispecific formats described hereinbelow);
[1619] improved suitability or susceptibility for “humanizing” substitutions (as defined herein);
[1620] less immunogenicity, either in a monovalent format, in a multivalent format (for example in a bivalent format) and/or in a multispecific format (for example one of the multispecific formats described hereinbelow);
[1621] increased stability, either in a monovalent format, in a multivalent format (for example in a bivalent format) and/or in a multispecific format (for example one of the multispecific formats described hereinbelow);
[1622] increased specificity towards heterodimeric cytokines and/or their receptors, either in a monovalent format, in a multivalent format (for example in a bivalent format) and/or in a multispecific format (for example one of the multispecific formats described hereinbelow);
[1623] decreased or where desired increased cross-reactivity with heterodimeric cytokines and/or their receptors from different species;

[1624] and/or
[1625] one or more other improved properties desirable for pharmaceutical use (including prophylactic use and/or therapeutic use) and/or for diagnostic use (including but not limited to use for imaging purposes), either in a monovalent format, in a multivalent format (for example in a bivalent format) and/or in a multispecific format (for example one of the multispecific formats described hereinbelow).

[1626] As generally described herein for the amino acid sequences of the invention, the Nanobodies of the invention are preferably in essentially isolated form (as defined herein), or form part of a protein or polypeptide of the invention (as defined herein), which may comprise or essentially consist of one or more Nanobodies of the invention and which may optionally further comprise one or more further amino acid sequences (all optionally linked via one or more suitable linkers). For example, and without limitation, the one or more amino acid sequences of the invention may be used as a binding unit in such a protein or polypeptide, which may optionally contain one or more further amino acid sequences that can serve as a binding unit (i.e. against one or more other targets than heterodimeric cytokines and/or their receptors), so as to provide a monovalent, multivalent or multispecific polypeptide of the invention, respectively, all as described herein. In particular, such a protein or polypeptide may comprise or essentially consist of one or more Nanobodies of the invention and optionally one or more (other) Nanobodies (i.e. directed against other targets than heterodimeric cytokines and/or their receptors), all optionally linked via one or more suitable linkers, so as to provide a monovalent, multivalent or multispecific Nanobody construct, respectively, as further described herein. Such proteins or polypeptides may also be in essentially isolated form (as defined herein).

[1627] In a Nanobody of the invention, the binding site for binding against heterodimeric cytokines and/or their receptors is preferably formed by the CDR sequences. Optionally, a Nanobody of the invention may also, and in addition to the at least one binding site for binding against heterodimeric cytokines and/or their receptors, contain one or more further binding sites for binding against other antigens, proteins or targets. For methods and positions for introducing such second binding sites, reference is for example made to Keck and Huston, Biophysical Journal, 71, October 1996, 2002-2011; EP 0 640 130; WO 06/07260.

[1628] As generally described herein for the amino acid sequences of the invention, when a Nanobody of the invention (or a polypeptide of the invention comprising the same) is intended for administration to a subject (for example for therapeutic and/or diagnostic purposes as described herein), it is preferably directed against human heterodimeric cytokines and/or their receptors; whereas for veterinary purposes, it is preferably directed against heterodimeric cytokines and/or their receptors from the species to be treated. Also, as with the amino acid sequences of the invention, a Nanobody of the invention may or may not be cross-reactive (i.e. directed against heterodimeric cytokines and/or their receptors from two or more species of mammal, such as against human heterodimeric cytokines and/or their receptors and heterodimeric cytokines and/or their receptors from at least one of the species of mammal mentioned herein).

[1629] Also, again as generally described herein for the amino acid sequences of the invention, the Nanobodies of the invention may generally be directed against any antigenic determinant, epitope, part, domain, subunit or confirmation (where applicable) of heterodimeric cytokines and/or their receptors, such as an interaction site (as defined herein) or a site, antigenic determinant, epitope, part, domain that is not an interaction site.

[1630] As already described herein, the amino acid sequence and structure of a Nanobody can be considered—without however being limited thereto—to be comprised of four framework regions or “FR's” (or sometimes also referred to as “FW's”), which are referred to in the art and herein as “Framework region 1” or “FR1”; as “Framework region 2” or “FR2”; as “Framework region 3” or “FR3”; and as “Framework region 4” or “FR4”, respectively; which framework regions are interrupted by three complementary determining regions or “CDR's”, which are referred to in the art as “Complementarity Determining Region 1” or “CDR1”; as “Complementarity Determining Region 2” or “CDR2”; and as “Complementarity Determining Region 3” or “CDR3”, respectively. Some preferred framework sequences and CDR's (and combinations thereof) that are present in the Nanobodies of the invention are as described herein. Other suitable CDR sequences can be obtained by the methods described herein.

[1631] According to a non-limiting but preferred aspect of the invention, (the CDR sequences present in) the Nanobodies of the invention are such that:
[1632] the Nanobodies can bind to heterodimeric cytokines and/or their receptors with a dissociation constant (K_{D}) of 10⁻⁵ to 10⁻¹² moles/liter or less, and preferably 10⁻⁷ to 10⁻¹² moles/liter or less and more preferably 10⁻⁸ to 10⁻¹² moles/liter (i.e. with an association constant (K_{A}) of 10⁵ to 10¹² liter/moles or more, and preferably 10⁷ to 10¹² liter/moles or more and more preferably 10⁸ to 10¹² liter/moles);

[1633] and/or such that:
[1634] the Nanobodies can bind to heterodimeric cytokines and/or their receptors with a kₒₙ-rate of between 10² M⁻¹ s⁻¹ to about 10⁷ M⁻¹ s⁻¹, preferably between 10³ M⁻¹ s⁻¹ and 10⁷ M⁻¹ s⁻¹, more preferably between 10⁴ M⁻¹ s⁻¹ and 10⁷ M⁻¹ s⁻¹, such as between 10⁵ M⁻¹ s⁻¹ and 10⁷ M⁻¹ s⁻¹;

[1635] and/or such that they:
[1636] the Nanobodies can bind to heterodimeric cytokines and/or their receptors with a k_{off} rate between 1 s⁻¹ (t_{1/2}=0.69 s) and 10⁻⁶ s⁻¹ (providing a near irreversible complex with a t_{1/2} of multiple days), preferably between 10⁻² s⁻¹ and 10⁻⁶ s⁻¹, more preferably between 10⁻³ s⁻¹ and 10⁻⁶ s⁻¹, such as between 10⁻⁴ s⁻¹ and 10⁻⁶ s⁻¹.

[1637] Preferably, (the CDR sequences present in) the Nanobodies of the invention are such that: a monovalent Nanobody of the invention (or a polypeptide that contains only one Nanobody of the invention) is preferably such that it will bind to heterodimeric cytokines and/or their receptors with an affinity less than 500 nM, preferably less than 200 nM, more preferably less than 10 nM, such as less than 500 pM.

[1638] The affinity of the Nanobody of the invention against heterodimeric cytokines and/or their receptors can be determined in a manner known per se, for example using the general techniques for measuring K_{D}. K_{A}, k_{off} or kₒₙ mentioned herein, as well as some of the specific assays described herein.

[1639] Some preferred IC50 values for binding of the Nanobodies of the invention (and of polypeptides comprising the same) to heterodimeric cytokines and/or their receptors will become clear from the further description and examples herein.

[1640] In a preferred but non-limiting aspect, the invention relates to a (single) domain antibody and/or a Nanobody (as defined herein) which is a p19+ sequence (as defined herein), which consists of 4 framework regions (FR1 to FR4 respectively) and 3 complementarity determining regions (CDR1 to CDR3 respectively), in which:
[1641] CDR1 is chosen from the group consisting of:
[1642] a) the amino acid sequences from the CDR1 Sequences Group 2 (see Table A-1 and FIG. 11);
[1643] b) amino acid sequences that have at least 80% amino acid identity with at least one of the amino acid sequences from the CDR1 Sequences Group 2;
[1644] c) amino acid sequences that have 3, 2, or 1 amino acid difference with at least one of the amino acid sequences from the CDR1 Sequences Group 2;

[1645] and/or
[1646] CDR2 is chosen from the group consisting of:
[1647] d) the amino acid sequences from the CDR2 Sequences Group 4;
[1648] e) amino acid sequences that have at least 80% amino acid identity with at least one of the amino acid sequences from the CDR2 Sequences Group 4;
[1649] f) amino acid sequences that have 3, 2, or 1 amino acid difference with at least one of the amino acid sequences from the CDR2 Sequences Group 4;

[1650] and/or
[1651] CDR3 is chosen from the group consisting of:
[1652] g) the amino acid sequences from the CDR3 Sequences Group 6;
[1653] h) amino acid sequences that have at least 80% amino acid identity with at least one of the amino acid sequences from the CDR3 Sequences Group 6;
[1654] i) amino acid sequences that have 3, 2, or 1 amino acid difference with at least one of the amino acid sequences from the CDR3 Sequences Group 6;

[1655] or any suitable fragment of such an amino acid sequence.

[1656] In particular, according to this preferred but non-limiting aspect, the invention relates to a (single) domain antibody and/or a Nanobody (as defined herein) which is a p19+ sequence, which consists of 4 framework regions (FR1 to FR4 respectively) and 3 complementarity determining regions (CDR1 to CDR3 respectively), in which:
[1657] CDR1 is chosen from the group consisting of:
[1658] a) the amino acid sequences from the CDR1 Sequences Group 2;
[1659] b) amino acid sequences that have at least 80% amino acid identity with at least one of the amino acid sequences from the CDR1 Sequences Group 2;
[1660] c) amino acid sequences that have 3, 2, or 1 amino acid difference with at least one of the amino acid sequences from the CDR1 Sequences Group 2;

[1661] and
[1662] CDR2 is chosen from the group consisting of:
[1663] d) the amino acid sequences from the CDR2 Sequences Group 4;
[1664] e) amino acid sequences that have at least 80% amino acid identity with at least one of the amino acid sequences from the CDR2 Sequences Group 4;
[1665] f) amino acid sequences that have 3, 2, or 1 amino acid difference with at least one of the amino acid sequences from the CDR2 Sequences Group 4;

[1666] and
[1667] CDR3 is chosen from the group consisting of:
[1668] g) the amino acid sequences from the CDR3 Sequences Group 6;
[1669] h) amino acid sequences that have at least 80% amino acid identity with at least one of the amino acid sequences from the CDR3 Sequences Group 6;
[1670] i) amino acid sequences that have 3, 2, or 1 amino acid difference with at least one of the amino acid sequences from the CDR3 Sequences Group 6;

[1671] or any suitable fragment of such an amino acid sequence.

[1672] In another preferred but non-limiting aspect, the invention relates to a (single) domain antibody and/or a Nanobody (as defined herein) which is a p19-sequence (as defined herein), which consists of 4 framework regions (FR1 to FR4 respectively) and 3 complementarity determining regions (CDR1 to CDR3 respectively), in which:
[1673] CDR1 is chosen from the group consisting of:
[1674] a) the amino acid sequences from the CDR1 Sequences Group 9 (see Table A-1 and FIG. 12);
[1675] b) amino acid sequences that have at least 80% amino acid identity with at least one of the amino acid sequences from the CDR1 Sequences Group 9;
[1676] c) amino acid sequences that have 3, 2, or 1 amino acid difference with at least one of the amino acid sequences from the CDR1 Sequences Group 9;

[1677] and/or
[1678] CDR2 is chosen from the group consisting of:
[1679] d) the amino acid sequences from the CDR2 Sequences Group 11;
[1680] e) amino acid sequences that have at least 80% amino acid identity with at least one of the amino acid sequences from the CDR2 Sequences Group 11;
[1681] f) amino acid sequences that have 3, 2, or 1 amino acid difference with at least one of the amino acid sequences from the CDR2 Sequences Group 11;

[1682] and/or
[1683] CDR3 is chosen from the group consisting of:
[1684] g) the amino acid sequences from the CDR3 Sequences Group 13;
[1685] h) amino acid sequences that have at least 80% amino acid identity with at least one of the amino acid sequences from the CDR3 Sequences Group 13;
[1686] i) amino acid sequences that have 3, 2, or 1 amino acid difference with at least one of the amino acid sequences from the CDR3 Sequences Group 13;

[1687] or any suitable fragment of such an amino acid sequence.

[1688] In particular, according to this preferred but non-limiting aspect, the invention relates to a (single) domain antibody and/or a Nanobody (as defined herein) which is a p19-sequence, which consists of 4 framework regions (FR1 to FR4 respectively) and 3 complementarity determining regions (CDR1 to CDR3 respectively), in which:
[1689] CDR1 is chosen from the group consisting of:
[1690] a) the amino acid sequences from the CDR1 Sequences Group 9;
[1691] b) amino acid sequences that have at least 80% amino acid identity with at least one of the amino acid sequences from the CDR1 Sequences Group 9;
[1692] c) amino acid sequences that have 3, 2, or 1 amino acid difference with at least one of the amino acid sequences from the CDR1 Sequences Group 9;

[1693] and
[1694] CDR2 is chosen from the group consisting of:
[1695] d) the amino acid sequences from the CDR2 Sequences Group 11;
[1696] e) amino acid sequences that have at least 80% amino acid identity with at least one of the amino acid sequences from the CDR2 Sequences Group 11;
[1697] f) amino acid sequences that have 3, 2, or 1 amino acid difference with at least one of the amino acid sequences from the CDR2 Sequences Group 11;

[1698] and
[1699] CDR3 is chosen from the group consisting of:
[1700] g) the amino acid sequences from the CDR3 Sequences Group 13;
[1701] h) amino acid sequences that have at least 80% amino acid identity with at least one of the amino acid sequences from the CDR3 Sequences Group 13;
[1702] i) amino acid sequences that have 3, 2, or 1 amino acid difference with at least one of the amino acid sequences from the CDR3 Sequences Group 13;

[1703] or any suitable fragment of such an amino acid sequence.

[1704] In another preferred but non-limiting aspect, the invention relates to a (single) domain antibody and/or a Nanobody (as defined herein) which is a p40-sequence (as defined herein), which consists of 4 framework regions (FR1 to FR4 respectively) and 3 complementarity determining regions (CDR1 to CDR3 respectively), in which:
[1705] CDR1 is chosen from the group consisting of:
[1706] a) the amino acid sequences from the CDR1 Sequences Group 16 (see Table A-1 and FIG. 13);
[1707] b) amino acid sequences that have at least 80% amino acid identity with at least one of the amino acid sequences from the CDR1 Sequences Group 16;
[1708] c) amino acid sequences that have 3, 2, or 1 amino acid difference with at least one of the amino acid sequences from the CDR1 Sequences Group 16;

[1709] and/or
[1710] CDR2 is chosen from the group consisting of:
[1711] d) the amino acid sequences from the CDR2 Sequences Group 18;
[1712] e) amino acid sequences that have at least 80% amino acid identity with at least one of the amino acid sequences from the CDR2 Sequences Group 18;
[1713] f) amino acid sequences that have 3, 2, or 1 amino acid difference with at least one of the amino acid sequences from the CDR2 Sequences Group 18;

[1714] and/or
[1715] CDR3 is chosen from the group consisting of:
[1716] g) the amino acid sequences from the CDR3 Sequences Group 20;
[1717] h) amino acid sequences that have at least 80% amino acid identity with at least one of the amino acid sequences from the CDR3 Sequences Group 20;
[1718] i) amino acid sequences that have 3, 2, or 1 amino acid difference with at least one of the amino acid sequences from the CDR3 Sequences Group 20;

[1719] or any suitable fragment of such an amino acid sequence.

[1720] In particular, according to this preferred but non-limiting aspect, the invention relates to a (single) domain antibody and/or a Nanobody (as defined herein) which is a p40-sequence, which consists of 4 framework regions (FR1 to FR4 respectively) and 3 complementarity determining regions (CDR1 to CDR3 respectively), in which:
[1721] CDR1 is chosen from the group consisting of:
[1722] a) the amino acid sequences from the CDR1 Sequences Group 16;
[1723] b) amino acid sequences that have at least 80% amino acid identity with at least one of the amino acid sequences from the CDR1 Sequences Group 16;
[1724] c) amino acid sequences that have 3, 2, or 1 amino acid difference with at least one of the amino acid sequences from the CDR1 Sequences Group 16;

[1725] and
[1726] CDR2 is chosen from the group consisting of:
[1727] d) the amino acid sequences from the CDR2 Sequences Group 18;
[1728] e) amino acid sequences that have at least 80% amino acid identity with at least one of the amino acid sequences from the CDR2 Sequences Group 18;
[1729] f) amino acid sequences that have 3, 2, or 1 amino acid difference with at least one of the amino acid sequences from the CDR2 Sequences Group 18;

[1730] and
[1731] CDR3 is chosen from the group consisting of:
[1732] g) the amino acid sequences from the CDR3 Sequences Group 20;
[1733] h) amino acid sequences that have at least 80% amino acid identity with at least one of the amino acid sequences from the CDR3 Sequences Group 20;
[1734] i) amino acid sequences that have 3, 2, or 1 amino acid difference with at least one of the amino acid sequences from the CDR3 Sequences Group 20;

[1735] or any suitable fragment of such an amino acid sequence.

[1736] In another preferred but non-limiting aspect, the invention relates to a (single) domain antibody and/or a Nanobody (as defined herein) which is a p40+ sequence (as defined herein), which consists of 4 framework regions (FR1 to FR4 respectively) and 3 complementarity determining regions (CDR1 to CDR3 respectively), in which:
[1737] CDR1 is chosen from the group consisting of:
[1738] a) the amino acid sequences from the CDR1 Sequences Group 23 (see Table A-1 and FIG. 14);
[1739] b) amino acid sequences that have at least 80% amino acid identity with at least one of the amino acid sequences from the CDR1 Sequences Group 23;
[1740] c) amino acid sequences that have 3, 2, or 1 amino acid difference with at least one of the amino acid sequences from the CDR1 Sequences Group 23;

[1741] and/or
[1742] CDR2 is chosen from the group consisting of:
[1743] d) the amino acid sequences from the CDR2 Sequences Group 25;
[1744] e) amino acid sequences that have at least 80% amino acid identity with at least one of the amino acid sequences from the CDR2 Sequences Group 25;
[1745] f) amino acid sequences that have 3, 2, or 1 amino acid difference with at least one of the amino acid sequences from the CDR2 Sequences Group 25;

[1746] and/or
[1747] CDR3 is chosen from the group consisting of:
[1748] g) the amino acid sequences from the CDR3 Sequences Group 27;
[1749] h) amino acid sequences that have at least 80% amino acid identity with at least one of the amino acid sequences from the CDR3 Sequences Group 27;
[1750] i) amino acid sequences that have 3, 2, or 1 amino acid difference with at least one of the amino acid sequences from the CDR3 Sequences Group 27;

[1751] or any suitable fragment of such an amino acid sequence.

[1752] In particular, according to this preferred but non-limiting aspect, the invention relates to a (single) domain antibody and/or a Nanobody (as defined herein) which is a p40+ sequence, which consists of 4 framework regions (FR1 to FR4 respectively) and 3 complementarity determining regions (CDR1 to CDR3 respectively), in which:
[1753] CDR1 is chosen from the group consisting of:
[1754] a) the amino acid sequences from the CDR1 Sequences Group 23;
[1755] b) amino acid sequences that have at least 80% amino acid identity with at least one of the amino acid sequences from the CDR1 Sequences Group 23;
[1756] c) amino acid sequences that have 3, 2, or 1 amino acid difference with at least one of the amino acid sequences from the CDR1 Sequences Group 23;

[1757] and
[1758] CDR2 is chosen from the group consisting of:
[1759] d) the amino acid sequences from the CDR2 Sequences Group 25;
[1760] e) amino acid sequences that have at least 80% amino acid identity with at least one of the amino acid sequences from the CDR2 Sequences Group 25;
[1761] f) amino acid sequences that have 3, 2, or 1 amino acid difference with at least one of the amino acid sequences from the CDR2 Sequences Group 25;

[1762] and
[1763] CDR3 is chosen from the group consisting of:
[1764] g) the amino acid sequences from the CDR3 Sequences Group 27;
[1765] h) amino acid sequences that have at least 80% amino acid identity with at least one of the amino acid sequences from the CDR3 Sequences Group 27;
[1766] i) amino acid sequences that have 3, 2, or 1 amino acid difference with at least one of the amino acid sequences from the CDR3 Sequences Group 27;

[1767] or any suitable fragment of such an amino acid sequence.

[1768] In another preferred but non-limiting aspect, the invention relates to a (single) domain antibody and/or a Nanobody (as defined herein) which is a p35 sequence (as defined herein), which consists of 4 framework regions (FR1 to FR4 respectively) and 3 complementarity determining regions (CDR1 to CDR3 respectively), in which:
[1769] CDR1 is chosen from the group consisting of:
[1770] a) the amino acid sequences from the CDR1 Sequences Group 30 (see Table A-1 and FIG. 15);
[1771] b) amino acid sequences that have at least 80% amino acid identity with at least one of the amino acid sequences from the CDR1 Sequences Group 30;
[1772] c) amino acid sequences that have 3, 2, or 1 amino acid difference with at least one of the amino acid sequences from the CDR1 Sequences Group 30;

[1773] and/or
[1774] CDR2 is chosen from the group consisting of:
[1775] d) the amino acid sequences from the CDR2 Sequences Group 32;
[1776] e) amino acid sequences that have at least 80% amino acid identity with at least one of the amino acid sequences from the CDR2 Sequences Group 32;
[1777] f) amino acid sequences that have 3, 2, or 1 amino acid difference with at least one of the amino acid sequences from the CDR2 Sequences Group 32;

[1778] and/or
[1779] CDR3 is chosen from the group consisting of:
[1780] g) the amino acid sequences from the CDR3 Sequences Group 34;
[1781] h) amino acid sequences that have at least 80% amino acid identity with at least one of the amino acid sequences from the CDR3 Sequences Group 34;
[1782] i) amino acid sequences that have 3, 2, or 1 amino acid difference with at least one of the amino acid sequences from the CDR3 Sequences Group 34;

[1783] or any suitable fragment of such an amino acid sequence.

[1784] In particular, according to this preferred but non-limiting aspect, the invention relates to a (single) domain antibody and/or a Nanobody (as defined herein) which is a p35 sequence, which consists of 4 framework regions (FR1 to FR4 respectively) and 3 complementarity determining regions (CDR1 to CDR3 respectively), in which:
[1785] CDR1 is chosen from the group consisting of:
[1786] a) the amino acid sequences from the CDR1 Sequences Group 30;
[1787] b) amino acid sequences that have at least 80% amino acid identity with at least one of the amino acid sequences from the CDR1 Sequences Group 30;
[1788] c) amino acid sequences that have 3, 2, or 1 amino acid difference with at least one of the amino acid sequences from the CDR1 Sequences Group 30;

[1789] and
[1790] CDR2 is chosen from the group consisting of:
[1791] d) the amino acid sequences from the CDR2 Sequences Group 32;
[1792] e) amino acid sequences that have at least 80% amino acid identity with at least one of the amino acid sequences from the CDR2 Sequences Group 32;
[1793] f) amino acid sequences that have 3, 2, or 1 amino acid difference with at least one of the amino acid sequences from the CDR2 Sequences Group 32;

[1794] and
[1795] CDR3 is chosen from the group consisting of:
[1796] g) the amino acid sequences from the CDR3 Sequences Group 34;
[1797] h) amino acid sequences that have at least 80% amino acid identity with at least one of the amino acid sequences from the CDR3 Sequences Group 34;
[1798] i) amino acid sequences that have 3, 2, or 1 amino acid difference with at least one of the amino acid sequences from the CDR3 Sequences Group 34;

[1799] or any suitable fragment of such an amino acid sequence.

[1800] In another preferred but non-limiting aspect, the invention relates to a (single) domain antibody and/or a Nanobody (as defined herein) which is an IL-27 sequence (as defined herein), which consists of 4 framework regions (FR1 to FR4 respectively) and 3 complementarity determining regions (CDR1 to CDR3 respectively), in which:
[1801] CDR1 is chosen from the group consisting of:
[1802] a) the amino acid sequences from the CDR1 Sequences Group 37 (see Table A-1 and FIG. 16);
[1803] b) amino acid sequences that have at least 80% amino acid identity with at least one of the amino acid sequences from the CDR1 Sequences Group 37;
[1804] c) amino acid sequences that have 3, 2, or 1 amino acid difference with at least one of the amino acid sequences from the CDR1 Sequences Group 37;

[1805] and/or
[1806] CDR2 is chosen from the group consisting of:
[1807] d) the amino acid sequences from the CDR2 Sequences Group 39;
[1808] e) amino acid sequences that have at least 80% amino acid identity with at least one of the amino acid sequences from the CDR2 Sequences Group 39;
[1809] f) amino acid sequences that have 3, 2, or 1 amino acid difference with at least one of the amino acid sequences from the CDR2 Sequences Group 39;

[1810] and/or
[1811] CDR3 is chosen from the group consisting of:
[1812] g) the amino acid sequences from the CDR3 Sequences Group 41;
[1813] h) amino acid sequences that have at least 80% amino acid identity with at least one of the amino acid sequences from the CDR3 Sequences Group 41;
[1814] i) amino acid sequences that have 3, 2, or 1 amino acid difference with at least one of the amino acid sequences from the CDR3 Sequences Group 41;

[1815] or any suitable fragment of such an amino acid sequence.

[1816] In particular, according to this preferred but non-limiting aspect, the invention relates to a (single) domain antibody and/or a Nanobody (as defined herein) which is an IL-27 sequence, which consists of 4 framework regions (FR1 to FR4 respectively) and 3 complementarity determining regions (CDR1 to CDR3 respectively), in which:
[1817] CDR1 is chosen from the group consisting of:
[1818] a) the amino acid sequences from the CDR1 Sequences Group 37;
[1819] b) amino acid sequences that have at least 80% amino acid identify with at least one of the amino acid sequences from the CDR1 Sequences Group 37;
[1820] c) amino acid sequences that have 3, 2, or 1 amino acid difference with at least one of the amino acid sequences from the CDR1 Sequences Group 37;

[1821] and
[1822] CDR2 is chosen from the group consisting of:
[1823] d) the amino acid sequences from the CDR2 Sequences Group 39;
[1824] e) amino acid sequences that have at least 80% amino acid identity with at least one of the amino acid sequences from the CDR2 Sequences Group 39;
[1825] f) amino acid sequences that have 3, 2, or 1 amino acid difference with at least one of the amino acid sequences from the CDR2 Sequences Group 39;

[1826] and
[1827] CDR3 is chosen from the group consisting of:
[1828] g) the amino acid sequences from the CDR3 Sequences Group 41;
[1829] h) amino acid sequences that have at least 80% amino acid identity with at least one of the amino acid sequences from the CDR3 Sequences Group 41;
[1830] i) amino acid sequences that have 3, 2, or 1 amino acid difference with at least one of the amino acid sequences from the CDR3 Sequences Group 41;
   [1831] or any suitable fragment of such an amino acid sequence.

[1832] In another preferred but non-limiting aspect, the invention relates to a (single) domain antibody and/or a Nanobody (as defined herein) which is an IL-12Rb1 sequence (as defined herein), which consists of 4 framework regions (FR1 to FR4 respectively) and 3 complementarity determining regions (CDR1 to CDR3 respectively), in which:
[1833] CDR1 is chosen from the group consisting of:
[1834] a) the amino acid sequences from the CDR1 Sequences Group 44 (see Table A-1 and FIG. 17);
[1835] b) amino acid sequences that have at least 80% amino acid identity with at least one of the amino acid sequences from the CDR1 Sequences Group 44;
[1836] c) amino acid sequences that have 3, 2, or 1 amino acid difference with at least one of the amino acid sequences from the CDR1 Sequences Group 44;

[1837] and/or
[1838] CDR2 is chosen from the group consisting of:
[1839] d) the amino acid sequences from the CDR2 Sequences Group 46;
[1840] e) amino acid sequences that have at least 80% amino acid identity with at least one of the amino acid sequences from the CDR2 Sequences Group 46;
[1841] amino acid sequences that have 3, 2, or 1 amino acid difference with at least one of the amino acid sequences from the CDR2 Sequences Group 46;

[1842] and/or
[1843] CDR3 is chosen from the group consisting of:
[1844] g) the amino acid sequences from the CDR3 Sequences Group 48;
[1845] h) amino acid sequences that have at least 80% amino acid identity with at least one of the amino acid sequences from the CDR3 Sequences Group 48;
[1846] i) amino acid sequences that have 3, 2, or 1 amino acid difference with at least one of the amino acid sequences from the CDR3 Sequences Group 48;

[1847] or any suitable fragment of such an amino acid sequence.

[1848] In particular, according to this preferred but non-limiting aspect, the invention relates to a (single) domain antibody and/or a Nanobody (as defined herein) which is an IL-12Rb1 sequence, which consists of 4 framework regions (FR1 to FR4 respectively) and 3 complementarity determining regions (CDR1 to CDR3 respectively), in which:
[1849] CDR1 is chosen from the group consisting of:
[1850] a) the amino acid sequences from the CDR1 Sequences Group 44;
[1851] b) amino acid sequences that have at least 80% amino acid identity with at least one of the amino acid sequences from the CDR1 Sequences Group 44;
[1852] c) amino acid sequences that have 3, 2, or 1 amino acid difference with at least one of the amino acid sequences from the CDR1 Sequences Group 44;

[1853] and
[1854] CDR2 is chosen from the group consisting of
[1855] d) the amino acid sequences from the CDR2 Sequences Group 46;
[1856] e) amino acid sequences that have at least 80% amino acid identity with at least one of the amino acid sequences from the CDR2 Sequences Group 46;
[1857] f) amino acid sequences that have 3, 2, or 1 amino acid difference with at least one of the amino acid sequences from the CDR2 Sequences Group 46;

[1858] and
[1859] CDR3 is chosen from the group consisting of:
[1860] g) the amino acid sequences from the CDR3 Sequences Group 48;
[1861] h) amino acid sequences that have at least 80% amino acid identity with at least one of the amino acid sequences from the CDR3 Sequences Group 48;
[1862] i) amino acid sequences that have 3, 2, or 1 amino acid difference with at least one of the amino acid sequences from the CDR3 Sequences Group 48;

[1863] or any suitable fragment of such an amino acid sequence.

[1864] In another preferred but non-limiting aspect, the invention relates to a (single) domain antibody and/or a Nanobody (as defined herein) which is an IL-12Rb2 sequence (as defined herein), which consists of 4 framework regions (FR1 to FR4 respectively) and 3 complementarity determining regions (CDR1 to CDR3 respectively), in which:
[1865] CDR1 is chosen from the group consisting of:
[1866] a) the amino acid sequences from the CDR1 Sequences Group 51 (see Table A-1 and FIG. 18);
[1867] b) amino acid sequences that have at least 80% amino acid identity with at least one of the amino acid sequences from the CDR1 Sequences Group 51;
[1868] c) amino acid sequences that have 3, 2, or 1 amino acid difference with at least one of the amino acid sequences from the CDR1 Sequences Group 51;

[1869] and/or
[1870] CDR2 is chosen from the group consisting of:
[1871] d) the amino acid sequences from the CDR2 Sequences Group 53;
[1872] e) amino acid sequences that have at least 80% amino acid identity with at least one of the amino acid sequences from the CDR2 Sequences Group 53;
[1873] f) amino acid sequences that have 3, 2, or 1 amino acid difference with at least one of the amino acid sequences from the CDR2 Sequences Group 53;

[1874] and/or
[1875] CDR3 is chosen from the group consisting of:
[1876] g) the amino acid sequences from the CDR3 Sequences Group 55;
[1877] h) amino acid sequences that have at least 80% amino acid identity with at least one of the amino acid sequences from the CDR3 Sequences Group 55;
[1878] i) amino acid sequences that have 3, 2, or 1 amino acid difference with at least one of the amino acid sequences from the CDR3 Sequences Group 55;

[1879] or any suitable fragment of such an amino acid sequence.

[1880] In particular, according to this preferred but non-limiting aspect, the invention relates to a (single) domain antibody and/or a Nanobody (as defined herein) which is an IL-12Rb2 sequence, which consists of 4 framework regions (FR1 to FR4 respectively) and 3 complementarity determining regions (CDR1 to CDR3 respectively), in which:
[1881] CDR1 is chosen from the group consisting of:
[1882] a) the amino acid sequences from the CDR1 Sequences Group 51;
[1883] b) amino acid sequences that have at least 80% amino acid identity with at least one of the amino acid sequences from the CDR1 Sequences Group 51;
[1884] c) amino acid sequences that have 3, 2, or 1 amino acid difference with at least one of the amino acid sequences from the CDR1 Sequences Group 51;

[1885] and
[1886] CDR2 is chosen from the group consisting of:
[1887] d) the amino acid sequences from the CDR2 Sequences Group 53;
[1888] e) amino acid sequences that have at least 80% amino acid identity with at least one of the amino acid sequences from the CDR2 Sequences Group 53;
[1889] f) amino acid sequences that have 3, 2, or 1 amino acid difference with at least one of the amino acid sequences from the CDR2 Sequences Group 53;

[1890] and
[1891] CDR3 is chosen from the group consisting of:
[1892] g) the amino acid sequences from the CDR3 Sequences Group 55;
[1893] h) amino acid sequences that have at least 80% amino acid identity with at least one of the amino acid sequences from the CDR3 Sequences Group 55;
[1894] i) amino acid sequences that have 3, 2, or 1 amino acid difference with at least one of the amino acid sequences from the CDR3 Sequences Group 55;

[1895] or any suitable fragment of such an amino acid sequence.

[1896] In another preferred but non-limiting aspect, the invention relates to a (single) domain antibody and/or a Nanobody (as defined herein) which is an IL-23R sequence (as defined herein), which consists of 4 framework regions (FR1 to FR4 respectively) and 3 complementarity determining regions (CDR1 to CDR3 respectively), in which:
[1897] CDR1 is chosen from the group consisting of:
[1898] a) the amino acid sequences from the CDR1 Sequences Group 58 (see Table A-1 and FIG. 18);
[1899] b) amino acid sequences that have at least 80% amino acid identity with at least one of the amino acid sequences from the CDR1 Sequences Group 58;
[1900] c) amino acid sequences that have 3, 2, or 1 amino acid difference with at least one of the amino acid sequences from the CDR1 Sequences Group 58;

[1901] and/or
[1902] CDR2 is chosen from the group consisting of:
[1903] d) the amino acid sequences from the CDR2 Sequences Group 60;
[1904] e) amino acid sequences that have at least 80% amino acid identity with at least one of the amino acid sequences from the CDR2 Sequences Group 60;
[1905] amino acid sequences that have 3, 2, or 1 amino acid difference with at least one of the amino acid sequences from the CDR2 Sequences Group 60;

[1906] and/or
[1907] CDR3 is chosen from the group consisting of:
[1908] g) the amino acid sequences from the CDR3 Sequences Group 62;
[1909] h) amino acid sequences that have at least 80% amino acid identity with at least one of the amino acid sequences from the CDR3 Sequences Group 62;
[1910] i) amino acid sequences that have 3, 2, or 1 amino acid difference with at least one of the amino acid sequences from the CDR3 Sequences Group 62;

[1911] or any suitable fragment of such an amino acid sequence.

[1912] In particular, according to this preferred but non-limiting aspect, the invention relates to a (single) domain antibody and/or a Nanobody (as defined herein) which is an IL-23R sequence, which consists of 4 framework regions (FR1 to FR4 respectively) and 3 complementarity determining regions (CDR1 to CDR3 respectively), in which:
[1913] CDR1 is chosen from the group consisting of:
[1914] a) the amino acid sequences from the CDR1 Sequences Group 58;
[1915] b) amino acid sequences that have at least 80% amino acid identity with at least one of the amino acid sequences from the CDR1 Sequences Group 58;
[1916] c) amino acid sequences that have 3, 2, or 1 amino acid difference with at least one of the amino acid sequences from the CDR1 Sequences Group 58;

[1917] and
[1918] CDR2 is chosen from the group consisting of:
[1919] d) the amino acid sequences from the CDR2 Sequences Group 60;
[1920] e) amino acid sequences that have at least 80% amino acid identity with at least one of the amino acid sequences from the CDR2 Sequences Group 60;
[1921] f) amino acid sequences that have 3, 2, or 1 amino acid difference with at least one of the amino acid sequences from the CDR2 Sequences Group 60;

[1922] and
[1923] CDR3 is chosen from the group consisting of:
[1924] g) the amino acid sequences from the CDR3 Sequences Group 62;
[1925] h) amino acid sequences that have at least 80% amino acid identity with at least one of the amino acid sequences from the CDR3 Sequences Group 62;
[1926] i) amino acid sequences that have 3, 2, or 1 amino acid difference with at least one of the amino acid sequences from the CDR3 Sequences Group 62;

[1927] or any suitable fragment of such an amino acid sequence.

[1928] Generally, Nanobodies with the above CDR sequences may be as further described herein, and preferably have framework sequences that are also as further described herein. Thus, for example and as mentioned herein, such Nanobodies may be naturally occurring Nanobodies (from any suitable species), naturally occurring V_{HH} sequences (i.e. from a suitable species of Camelid) or synthetic or semi-synthetic amino acid sequences or Nanobodies, including but not limited to partially humanized Nanobodies or V_{HH} sequences, fully humanized Nanobodies or V_{HH} sequences, camelized heavy chain variable domain sequences, as well as Nanobodies that have been obtained by the techniques mentioned herein.

[1929] Also, the above p19+, p19−, p40+, p40−, anti p35, anti-IL-27, anti IL-12Rb1, anti IL-12Rb2 and anti IL-23R Nanobodies, respectively, preferably as described herein in terms of degree of sequence identity with, the number of amino acid differences with, and/or of the ability to cross-block and/or compete, with the p19+ sequences, p19− sequences, p40− sequences, p40+ sequences, p35 sequences, IL-27 sequences, IL-12Rb1 sequences, IL-12Rb2 sequences or IL-23R sequences, respectively,that are mentioned in Table A-2. Preferably, the p19+, p19−, p40+, p40−, anti p35, anti-IL-27, anti IL-12Rb1, anti IL-12Rb2 and anti IL-23R Nanobodies are chosen from the corresponding sequences mentioned in Table A-2.

[1930] Thus, in one specific, but non-limiting aspect, the invention relates to a humanized Nanobody, which consists of 4 framework regions (FR1 to FR4 respectively) and 3 complementarity determining regions (CDR1 to CDR3 respectively), in which CDR1 to CDR3 are as defined herein and in which said humanized Nanobody comprises at least one humanizing substitution (as defined herein), and in particular at least one humanizing substitution in at least one of its framework sequences (as defined herein).

[1931] Another preferred, but non-limiting aspect of the invention relates to humanized variants of the above p19+, p19−, p40+, p40−, anti p35, anti-IL-27, anti IL-12Rb1, anti IL-12Rb2 and anti IL-23R Nanobodies, that comprise, compared to the corresponding native V_{HH} sequence (i.e. as mentioned in Table A-2), at least one humanizing substitution (as defined herein), and in particular at least one humanizing substitution in at least one of its framework sequences (as defined herein). Examples of such humanized Nanobodies are given in SEQ ID NO's: 2559 to 2614 (see also FIG. 31), and the skilled person will be able to find other suitable humanized variants based on the disclosure herein, optionally after some limited trial-and-error.

[1932] The polypeptides of the invention comprise or essentially consist of at least one Nanobody of the invention. Some preferred, but non-limiting examples of polypeptides of the invention are given in SEQ ID NO's: 2142 to 2169 and 2530 to 2558 (see also FIG. 30), as well as SEQ ID NO:2615 to 2622 (see FIGS. 32), 2623 to 2629, 2643 and 2644 (see FIG. 33), SEQ ID NO: 2630 to 2641 (see FIG. 34), SEQ ID NO: 2645 and 2646 (see FIG. 35) and SEQ ID NO: 2647 and 2648 (see FIG. 36). The invention also relates to polypeptides that have at least 70%, such as at least 80%, for example at least 90% sequence identity with at least one of these polypeptides.

[1933] For example, as further described in the Experimental Part, in the splenocyte assay described by Aggarwal (see Example 15), the Monovalent Nb 121A2 gave an IC50 of about 1.5 nM, whereas the following biparatopic constructs gave the following IC 50 values: 121A2-35GS-81A2: IC50=˜60 pM; 121A2-35GS-81G2: IC50=˜90 pM: 121A2-35GS-119G7): IC50=30-60 pM; 121A2-35GS-124H2: IC50=˜90 pM; and 121A2-35GS-124H IC50=˜180 pM.

[1934] It will be clear to the skilled person that the Nanobodies that are mentioned herein as “preferred” (or “more preferred”, “even more preferred”, etc.) are also preferred (or more preferred, or even more preferred, etc.) for use in the polypeptides described herein. Thus, polypeptides that comprise or essentially consist of one or more “preferred” Nanobodies of the invention will generally be preferred, and polypeptides that comprise or essentially consist of one or more “more preferred” Nanobodies of the invention will generally be more preferred, etc.

[1935] Generally, proteins or polypeptides that comprise or essentially consist of a single Nanobody (such as a single Nanobody of the invention) will be referred to herein as “monovalent” proteins or polypeptides or as “monovalent constructs”. Proteins and polypeptides that comprise or essentially consist of two or more Nanobodies (such as at least two Nanobodies of the invention or at least one Nanobody of the invention and at least one other Nanobody) will be referred to herein as “multivalent” proteins or polypeptides or as “multivalent constructs”, and these may provide certain advantages compared to the corresponding monovalent Nanobodies of the invention. Some non-limiting examples of such multivalent constructs will become clear from the further description herein.

[1936] According to one specific, but non-limiting aspect, a polypeptide of the invention comprises or essentially consists of at least two Nanobodies of the invention, such as two or three Nanobodies of the invention. As further described herein, such multivalent constructs can provide certain advantages compared to a protein or polypeptide comprising or essentially consisting of a single Nanobody of the invention, such as a much improved avidity for heterodimeric cytokines and/or their receptors. Such multivalent constructs will be clear to the skilled person based on the disclosure herein.

[1937] According to another specific, but non-limiting aspect, a polypeptide of the invention comprises or essentially consists of at least one Nanobody of the invention and at least one other binding unit (i.e. directed against another epitope, antigen, target, protein or polypeptide), which is preferably also a Nanobody. Such proteins or polypeptides are also referred to herein as “multispecific” proteins or polypeptides or as “multispecific constructs”, and these may provide certain advantages compared to the corresponding monovalent Nanobodies of the invention (as will become clear from the further discussion herein of some preferred, but-nonlimiting multispecific constructs). Such multispecific constructs will be clear to the skilled person based on the disclosure herein, and may in particular be biparatopic constructs (as mentioned herein). Some preferred, but non-limiting examples of such multispecific Nanobody constructs will be clear to the skilled person based on the disclosure herein.

[1938] According to yet another specific, but non-limiting aspect, a polypeptide of the invention comprises or essentially consists of at least one Nanobody of the invention, optionally one or more further Nanobodies, and at least one other amino acid sequence (such as a protein or polypeptide) that confers at least one desired property to the Nanobody of the invention and/or to the resulting fusion protein. Again, such fusion proteins may provide certain advantages compared to the corresponding monovalent Nanobodies of the invention. Some non-limiting examples of such amino acid sequences and of such fusion constructs will become clear from the further description herein.

[1939] It is also possible to combine two or more of the above aspects, for example to provide a trivalent bispecific construct comprising two Nanobodies of the invention and one other Nanobody, and optionally one or more other amino acid sequences. Further non-limiting examples of such constructs, as well as some constructs that are particularly preferred within the context of the present invention, will become clear from the further description herein.

[1940] In the above constructs, the one or more Nanobodies and/or other amino acid sequences may be directly linked to each other and/or suitably linked to each other via one or more linker sequences. Some suitable but non-limiting examples of such linkers will become clear from the further description herein.

[1941] In one specific aspect of the invention, a Nanobody of the invention or a compound, construct or polypeptide of the invention comprising at least one Nanobody of the invention may have an increased half-life, compared to the corresponding amino acid sequence of the invention. Some preferred, but non-limiting examples of such Nanobodies, compounds and polypeptides will become clear to the skilled person based on the further disclosure herein, and for example comprise Nanobodies sequences or polypeptides of the invention that have been chemically modified to increase the half-life thereof (for example, by means of pegylation); amino acid sequences of the invention that comprise at least one additional binding site for binding to a serum protein (such as serum albumin; or polypeptides of the invention that comprise at least one Nanobody of the invention that is linked to at least one moiety (and in particular at least one amino acid sequence) that increases the half-life of the Nanobody of the invention. Examples of polypeptides of the invention that comprise such half-life extending moieties or amino acid sequences will become clear to the skilled person based on the further disclosure herein; and for example include, without limitation, polypeptides in which the one or more Nanobodies of the invention are suitable linked to one or more serum proteins or fragments thereof (such as serum albumin or suitable fragments thereof) or to one or more binding units that can bind to serum proteins (such as, for example, Nanobodies or (single) domain antibodies that can bind to serum proteins such as serum albumin, serum immunoglobulins such as IgG, or transferrine); polypeptides in which a Nanobody of the invention is linked to an Fe portion (such as a human Fe) or a suitable part or fragment thereof; or polypeptides in which the one or more Nanobodies of the invention are suitable linked to one or more small proteins or peptides that can bind to serum proteins (such as, without limitation, the proteins and peptides described in WO 91/01743, WO 01/45746, WO 02/076489 and to the U.S. provisional application of Ablynx N.V. entitled “Peptides capable of binding to serum proteins” of Ablynx N.V. filed on Dec. 5, 2006 (see also WO 068280) as well as the U.S. provisional applications 61/050,385 and 61/045,690 of Ablynx N.V. both entitled “Improved peptides capable of binding to serum proteins”.

[1942] Again, as will be clear to the skilled person, such Nanobodies, compounds, constructs or polypeptides may contain one or more additional groups, residues, moieties or binding units, such as one or more further amino acid sequences and in particular one or more additional Nanobodies (i.e. not directed against heterodimeric cytokines and/or their receptors), so as to provide a tri- of multispecific Nanobody construct.

[1943] Generally, the Nanobodies of the invention (or compounds, constructs or polypeptides comprising the same) with increased half-life preferably have a half-life that is at least 1.5 times, preferably at least 2 times, such as at least 5 times, for example at least 10 times or more than 20 times, greater than the half-life of the corresponding amino acid sequence of the invention per se. For example, the Nanobodies, compounds, constructs or polypeptides of the invention with increased half-life may have a half-life that is increased with more than 1 hours, preferably more than 2 hours, more preferably more than 6 hours, such as more than 12 hours, or even more than 24, 48 or 72 hours, compared to the corresponding amino acid sequence of the invention per se.

[1944] In a preferred, but non-limiting aspect of the invention, such Nanobodies, compound, constructs or polypeptides of the invention exhibit a serum half-life in human of at least about 12 hours, preferably at least 24 hours, more preferably at least 48 hours, even more preferably at least 72 hours or more. For example, compounds or polypeptides of the invention may have a half-life of at least 5 days (such as about 5 to 10 days), preferably at least 9 days (such as about 9 to 14 days), more preferably at least about 10 days (such as about 10 to 15 days), or at least about 11 days (such as about 11 to 16 days), more preferably at least about 12 days (such as about 12 to 18 days or more), or more than 14 days (such as about 14 to 19 days).

[1945] In another one aspect of the invention, a polypeptide of the invention comprises one or more (such as two or preferably one) Nanobodies of the invention linked (optionally via one or more suitable linker sequences) to one or more (such as two and preferably one) amino acid sequences that allow the resulting polypeptide of the invention to cross the blood brain barrier. In particular, said one or more amino acid sequences that allow the resulting polypeptides of the invention to cross the blood brain barrier may be one or more (such as two and preferably one) Nanobodies, such as the Nanobodies described in WO 02/057445, of which FC44 (SEQ ID NO: 189 of WO 06/040153) and FC5 (SEQ ID NO: 190 of WO 06/040154) are preferred examples.

[1946] In particular, polypeptides comprising one or more Nanobodies of the invention are preferably such that they:
[1947] bind to heterodimeric cytokines and/or their receptors with a dissociation constant (K_{D}) of 10⁻⁵ to 10⁻¹² moles/liter or less, and preferably 10⁻⁷ to 10⁻¹² moles/liter or less and more preferably 10⁻⁸ to 10⁻¹² moles/liter (i.e. with an association constant (K_{A}) of 10⁵ to 10¹² liter/moles or more, and preferably 10⁷ to 10¹² liter/moles or more and more preferably 10⁸ to 10¹² liter/moles);

[1948] and/or such that they:
[1949] bind to heterodimeric cytokines and/or their receptors with a kₒₙ-rate of between 10² M⁻¹ s⁻¹ to about 10⁷ M⁻¹ s⁻¹, preferably between 10³ M⁻¹ s⁻¹ and 10⁷ M⁻¹ s⁻¹, more preferably between 10⁴ M⁻¹ s⁻¹ and 10⁷ M⁻¹ s⁻¹, such as between 10⁵ M⁻¹s⁻¹ and 10⁷ M⁻¹ s⁻¹;

[1950] and/or such that they:
[1951] bind to heterodimeric cytokines and/or their receptors with a k_{off} rate between 1 s⁻¹ (t_{1/2}=0.69 s) and 10⁻⁶ s⁻¹ (providing a near irreversible complex with a t_{1/2} of multiple days), preferably between 10⁻² s⁻¹ and 10⁻⁶ s⁻¹, more preferably between 10⁻³ s⁻¹ and 10⁻⁶ s⁻¹, such as between 10⁻⁴ s⁻¹ and 10⁻⁶ s⁻¹.

[1952] Preferably, a polypeptide that contains only one amino acid sequence of the invention is preferably such that it will bind to heterodimeric cytokines and/or their receptors with an affinity less than 500 nM, preferably less than 200 nM, more preferably less than 10 nM, such as less than 500 pM. In this respect, it will be clear to the skilled person that a polypeptide that contains two or more Nanobodies of the invention may bind to heterodimeric cytokines and/or their receptors with an increased avidity, compared to a polypeptide that contains only one amino acid sequence of the invention.

[1953] Some preferred IC₅₀ values for binding of the amino acid sequences or polypeptides of the invention to heterodimeric cytokines and/or their receptors will become clear from the further description and examples herein.

[1954] Another aspect of this invention relates to a nucleic acid that encodes a Nanobody of the invention or a polypeptide of the invention comprising the same. Again, as generally described herein for the nucleic acids of the invention, such a nucleic acid may be in the form of a genetic construct, as defined herein.

[1955] In another aspect, the invention relates to host or host cell that expresses or that is capable of expressing an amino acid sequence (such as a (single) domain antibody and/or Nanobody) of the invention and/or a polypeptide of the invention comprising the same; and/or that contains a nucleic acid of the invention. Some preferred but non-limiting examples of such hosts or host cells will become clear from the further description herein.

[1956] Another aspect of the invention relates to a product or composition containing or comprising at least one amino acid sequence (such as a (single) domain antibody and/or Nanobody) of the invention, at least one polypeptide of the invention and/or at least one nucleic acid of the invention, and optionally one or more further components of such compositions known per se, i.e. depending on the intended use of the composition. Such a product or composition may for example be a pharmaceutical composition (as described herein), a veterinary composition or a product or composition for diagnostic use (as also described herein). Some preferred but non-limiting examples of such products or compositions will become clear from the further description herein.

[1957] The invention further relates to methods for preparing or generating the amino acid sequences, compounds, constructs, polypeptides, nucleic acids, host cells, products and compositions described herein. Some preferred but non-limiting examples of such methods will become clear from the further description herein.

[1958] The invention further relates to applications and uses of the amino acid sequences, compounds, constructs, polypeptides, nucleic acids, host cells, products and compositions described herein, as well as to methods for the prevention and/or treatment for diseases and disorders associated with heterodimeric cytokines and/or their receptors. Some preferred but non-limiting applications and uses will become clear from the further description herein.

[1959] Other aspects, embodiments, advantages and applications of the invention will also become clear from the further description hereinbelow.

[1960] Generally, it should be noted that the term Nanobody as used herein in its broadest sense is not limited to a specific biological source or to a specific method of preparation. For example, as will be discussed in more detail below, the Nanobodies of the invention can generally be obtained: (1) by isolating the V_{HH} domain of a naturally occurring heavy chain antibody; (2) by expression of a nucleotide sequence encoding a naturally occurring V_{HH} domain; (3) by “humanization” (as described herein) of a naturally occurring V_{HH} domain or by expression of a nucleic acid encoding a such humanized V_{HH} domain; (4) by “camelisation” (as described herein) of a naturally occurring V_{H} domain from any animal species, and in particular a from species of mammal, such as from a human being, or by expression of a nucleic acid encoding such a camelized V_{H} domain; (5) by “camelisation” of a “domain antibody” or “Dab” as described by Ward et al (supra), or by expression of a nucleic acid encoding such a camelized V_{H} domain; (6) by using synthetic or semi-synthetic techniques for preparing proteins, polypeptides or other amino acid sequences known per se; (7) by preparing a nucleic acid encoding a Nanobody using techniques for nucleic acid synthesis known per se, followed by expression of the nucleic acid thus obtained; and/or (8) by any combination of one or more of the foregoing. Suitable methods and techniques for performing the foregoing will be clear to the skilled person based on the disclosure herein and for example include the methods and techniques described in more detail herein.

[1961] One preferred class of Nanobodies corresponds to the V_{HH} domains of naturally occurring heavy chain antibodies directed against heterodimeric cytokines and/or their receptors. As further described herein, such V_{HH} sequences can generally be generated or obtained by suitably immunizing a species of Camelid with heterodimeric cytokines and/or their receptors (i.e. so as to raise an immune response and/or heavy chain antibodies directed against heterodimeric cytokines and/or their receptors), by obtaining a suitable biological sample from said Camelid (such as a blood sample, serum sample or sample of B-cells), and by generating V_{HH} sequences directed against heterodimeric cytokines and/or their receptors, starting from said sample, using any suitable technique known per se. Such techniques will be clear to the skilled person and/or are further described herein.

[1962] Alternatively, such naturally occurring V_{HH} domains against heterodimeric cytokines and/or their receptors, can be obtained from naïve libraries of Camelid V_{HH} sequences, for example by screening such a library using heterodimeric cytokines and/or their receptors, or at least one part, fragment, antigenic determinant or epitope thereof using one or more screening techniques known per se. Such libraries and techniques are for example described in WO 99/37681, WO 01/90190, WO 03/025020 and WO 03/035694. Alternatively, improved synthetic or semi-synthetic libraries derived from naïve V_{HH} libraries may be used, such as V_{HH} libraries obtained from naïve V_{HH} libraries by techniques such as random mutagenesis and/or CDR shuffling, as for example described in WO 00/43507.

[1963] Thus, in another aspect, the invention relates to a method for generating Nanobodies, that are directed against heterodimeric cytokines and/or their receptors. In one aspect, said method at least comprises the steps of:
[1964] a) providing a set, collection or library of Nanobody sequences; and
[1965] b) screening said set, collection or library of Nanobody sequences for Nanobody sequences that can bind to and/or have affinity for heterodimeric cytokines and/or their receptors;

[1966] and
[1967] c) isolating the amino acid sequence(s) that can bind to and/or have affinity for heterodimeric cytokines and/or their receptors.

[1968] In such a method, the set, collection or library of Nanobody sequences may be a naïve set, collection or library of Nanobody sequences; a synthetic or semi-synthetic set, collection or library of Nanobody sequences; and/or a set, collection or library of Nanobody sequences that have been subjected to affinity maturation.

[1969] In a preferred aspect of this method, the set, collection or library of Nanobody sequences may be an immune set, collection or library of Nanobody sequences, and in particular an immune set, collection or library of V_{HH} sequences, that have been derived from a species of Camelid that has been suitably immunized with heterodimeric cytokines and/or their receptors or with a suitable antigenic determinant based thereon or derived therefrom, such as an antigenic part, fragment, region, domain, loop or other epitope thereof. In one particular aspect, said antigenic determinant may be an extracellular part, region, domain, loop or other extracellular epitope(s).

[1970] In the above methods, the set, collection or library of Nanobody or V_{HH} sequences may be displayed on a phage, phagemid, ribosome or suitable micro-organism (such as yeast), such as to facilitate screening. Suitable methods, techniques and host organisms for displaying and screening (a set, collection or library of) Nanobody sequences will he clear to the person skilled in the art, for example on the basis of the further disclosure herein. Reference is also made to WO 03/054016 and to the review by Hoogenboom in Nature Biotechnology, 23, 9, 1105-1116 (2005).

[1971] In another aspect, the method for generating Nanobody sequences comprises at least the steps of:
[1972] a) providing a collection or sample of cells derived from a species of Camelid that express immunoglobulin sequences;
[1973] b) screening said collection or sample of cells for (i) cells that express an immunoglobulin sequence that can bind to and/or have affinity for heterodimeric cytokines and/or their receptors; and (ii) cells that express heavy chain antibodies, in which substeps (i) and (ii) can be performed essentially as a single screening step or in any suitable order as two separate screening steps, so as to provide at least one cell that expresses a heavy chain antibody that can bind to and/or has affinity for heterodimeric cytokines and/or their receptors;

[1974] and
[1975] c) either (i) isolating from said cell the V_{HH} sequence present in said heavy chain antibody; or (ii) isolating from said cell a nucleic acid sequence that encodes the V_{HH} sequence present in said heavy chain antibody, followed by expressing said V_{HH} domain.

[1976] In the method according to this aspect, the collection or sample of cells may for example be a collection or sample of B-cells. Also, in this method, the sample of cells may be derived from a Camelid that has been suitably immunized with heterodimeric cytokines and/or their receptors or a suitable antigenic determinant based thereon or derived therefrom, such as an antigenic part, fragment, region, domain, loop or other epitope thereof. In one particular aspect, said antigenic determinant may be an extracellular part, region, domain, loop or other extracellular epitope(s).

[1977] The above method may be performed in any suitable manner, as will be clear to the skilled person. Reference is for example made to EP 0 542 810, WO 05/19824, WO 04/051268 and WO 04/106377. The screening of step b) is preferably performed using a flow cytometry technique such as FACS. For this, reference is for example made to Lieby et al., Blood, Vol. 97, No. 12, 3820. Particular reference is made to the so-called “Nanoclone™” technique described in International application WO 06/079372 by Ablynx N.V.

[1978] In another aspect, the method for generating an amino acid sequence directed against heterodimeric cytokines and/or their receptors may comprise at least the steps of:
[1979] a) providing a set, collection or library of nucleic acid sequences encoding heavy chain antibodies or Nanobody sequences;
[1980] b) screening said set, collection or library of nucleic acid sequences for nucleic acid sequences that encode a heavy chain antibody or a Nanobody sequence that can bind to and/or has affinity for heterodimeric cytokines and/or their receptors;

[1981] and
[1982] c) isolating said nucleic acid sequence, followed by expressing the V_{HH} sequence present in said heavy chain antibody or by expressing said Nanobody sequence, respectively.

[1983] In such a method, the set, collection or library of nucleic acid sequences encoding heavy chain antibodies or Nanobody sequences may for example be a set, collection or library of nucleic acid sequences encoding a naïve set, collection or library of heavy chain antibodies or V_{HH} sequences; a set, collection or library of nucleic acid sequences encoding a synthetic or semi-synthetic set, collection or library of Nanobody sequences; and/or a set, collection or library of nucleic acid sequences encoding a set, collection or library of Nanobody sequences that have been subjected to affinity maturation.

[1984] In a preferred aspect of this method, the set, collection or library of nucleic acid sequences may be an immune set, collection or library of nucleic acid sequences encoding heavy chain antibodies or V_{HH} sequences derived from a Camelid that has been suitably immunized with heterodimeric cytokines and/or their receptors or with a suitable antigenic determinant based thereon or derived therefrom, such as an antigenic part, fragment, region, domain, loop or other epitope thereof. In one particular aspect, said antigenic determinant may be an extracellular part, region, domain, loop or other extracellular epitope(s).

[1985] In the above methods, the set, collection or library of nucleotide sequences may be displayed on a phage, phagemid, ribosome or suitable micro-organism (such as yeast), such as to facilitate screening. Suitable methods, techniques and host organisms for displaying and screening (a set, collection or library of) nucleotide sequences encoding amino acid sequences will be clear to the person skilled in the art, for example on the basis of the further disclosure herein. Reference is also made to WO 03/054016 and to the review by Hoogenboom in Nature Biotechnology, 23, 9, 1105-1116 (2005).

[1986] As will be clear to the skilled person, the screening step of the methods described herein can also be performed as a selection step. Accordingly the term “screening” as used in the present description can comprise selection, screening or any suitable combination of selection and/or screening techniques. Also, when a set, collection or library of sequences is used, it may contain any suitable number of sequences, such as 1, 2, 3 or about 5, 10, 50, 100, 500, 1000, 5000, 10⁴, 10⁵, 10⁶, 10⁷, 10⁸ or more sequences.

[1987] Also, one or more or all of the sequences in the above set, collection or library of amino acid sequences may be obtained or defined by rational, or semi-empirical approaches such as computer modelling techniques or biostatics or datamining techniques.

[1988] Furthermore, such a set, collection or library can comprise one, two or more sequences that are variants from one another (e.g. with designed point mutations or with randomized positions), compromise multiple sequences derived from a diverse set of naturally diversified sequences (e.g. an immune library)), or any other source of diverse sequences (as described for example in Hoogenboom et al, Nat Biotechnol 23:1105, 2005 and Binz et al, Nat Biotechnol 2005, 23:1247). Such set, collection or library of sequences can be displayed on the surface of a phage particle, a ribosome, a bacterium, a yeast cell, a mammalian cell, and linked to the nucleotide sequence encoding the amino acid sequence within these carriers. This makes such set, collection or library amenable to selection procedures to isolate the desired amino acid sequences of the invention. More generally, when a sequence is displayed on a suitable host or host cell, it is also possible (and customary) to first isolate from said host or host cell a nucleotide sequence that encodes the desired sequence, and then to obtain the desired sequence by suitably expressing said nucleotide sequence in a suitable host organism. Again, this can be performed in any suitable manner known per se, as will be clear to the skilled person.

[1989] Yet another technique for obtaining V_{HH} sequences or Nanobody sequences directed against heterodimeric cytokines and/or their receptors involves suitably immunizing a transgenic mammal that is capable of expressing heavy chain antibodies (i.e. so as to raise an immune response and/or heavy chain antibodies directed against heterodimeric cytokines and/or their receptors), obtaining a suitable biological sample from said transgenic mammal that contains (nucleic acid sequences encoding) said V_{HH} sequences or Nanobody sequences (such as a blood sample, serum sample or sample of B-cells), and then generating V_{HH} sequences directed against heterodimeric cytokines and/or their receptors, starting from said sample, using any suitable technique known per se (such as any of the methods described herein or a hybridoma technique). For example, for this purpose, the heavy chain antibody-expressing mice and the further methods and techniques described in WO 02/085945, WO 04/049794 and WO 06/008548 and Janssens et al., Proc. Natl. Acad. Sci. USA. 2006 Oct. 10; 103(41):15130-5 can be used. For example, such heavy chain antibody expressing mice can express heavy chain antibodies with any suitable (single) variable domain, such as (single) variable domains from natural sources (e.g. human (single) variable domains, Camelid (single) variable domains or shark (single) variable domains), as well as for example synthetic or semi-synthetic (single) variable domains.

[1990] The invention also relates to the V_{HH} sequences or Nanobody sequences that are obtained by the above methods, or alternatively by a method that comprises the one of the above methods and in addition at least the steps of determining the nucleotide sequence or amino acid sequence of said V_{HH} sequence or Nanobody sequence; and of expressing or synthesizing said V_{HH} sequence or Nanobody sequence in a manner known per se, such as by expression in a suitable host cell or host organism or by chemical synthesis.

[1991] As mentioned herein, a particularly preferred class of Nanobodies of the invention comprises Nanobodies with an amino acid sequence that corresponds to the amino acid sequence of a naturally occurring V_{HH} domain, but that has been “humanized”, i.e. by replacing one or more amino acid residues in the amino acid sequence of said naturally occurring V_{HH} sequence (and in particular in the framework sequences) by one or more of the amino acid residues that occur at the corresponding position(s) in a V_{H} domain from a conventional 4-chain antibody from a human being (e.g. indicated above). This can be performed in a manner known per se, which will be clear to the skilled person, for example on the basis of the further description herein and the prior art on humanization referred to herein. Again, it should be noted that such humanized Nanobodies of the invention can be obtained in any suitable manner known per se (i.e. as indicated under points (1)-(8) above) and thus are not strictly limited to polypeptides that have been obtained using a polypeptide that comprises a naturally occurring V_{HH} domain as a starting material.

[1992] Another particularly preferred class of Nanobodies of the invention comprises Nanobodies with an amino acid sequence that corresponds to the amino acid sequence of a naturally occurring V_{H} domain, but that has been “camelized”, i.e. by replacing one or more amino acid residues in the amino acid sequence of a naturally occurring V_{H} domain from a conventional 4-chain antibody by one or more of the amino acid residues that occur at the corresponding position(s) in a V_{HH} domain of a heavy chain antibody. This can be performed in a manner known per se, which will be clear to the skilled person, for example on the basis of the further description herein. Such “camelizing” substitutions are preferably inserted at amino acid positions that form and/or are present at the V_{H}-V_{L} interface, and/or at the so-called Camelidae hallmark residues, as defined herein (see for example WO 94/04678 and Davies and Riechmann (1994 and 1996), supra). Preferably, the V_{H} sequence that is used as a starting material or starting point for generating or designing the camelized Nanobody is preferably a V_{H} sequence from a mammal, more preferably the V_{H} sequence of a human being, such as a V_{H}3 sequence. However, it should be noted that such camelized Nanobodies of the invention can be obtained in any suitable manner known per se (i.e. as indicated under points (1)-(8) above) and thus are not strictly limited to polypeptides that have been obtained using a polypeptide that comprises a naturally occurring V_{H} domain as a starting material.

[1993] For example, again as further described herein, both “humanization” and “camelization” can be performed by providing a nucleotide sequence that encodes a naturally occurring V_{HH} domain or V_{H} domain, respectively, and then changing, in a manner known per se, one or more codons in said nucleotide sequence in such a way that the new nucleotide sequence encodes a “humanized” or “camelized” Nanobody of the invention, respectively. This nucleic acid can then be expressed in a manner known per se, so as to provide the desired Nanobody of the invention. Alternatively, based on the amino acid sequence of a naturally occurring V_{HH} domain or V_{H} domain, respectively, the amino acid sequence of the desired humanized or camelized Nanobody of the invention, respectively, can be designed and then synthesized de novo using techniques for peptide synthesis known per se. Also, based on the amino acid sequence or nucleotide sequence of a naturally occurring V_{HH} domain or V_{H} domain, respectively, a nucleotide sequence encoding the desired humanized or camelized Nanobody of the invention, respectively, can be designed and then synthesized de novo using techniques for nucleic acid synthesis known per se, after which the nucleic acid thus obtained can be expressed in a manner known per se, so as to provide the desired Nanobody of the invention.

[1994] Other suitable methods and techniques for obtaining the Nanobodies of the invention and/or nucleic acids encoding the same, starting from naturally occurring V_{H} sequences or preferably V_{HH} sequences, will be clear from the skilled person, and may for example comprise combining one or more parts of one or more naturally occurring V_{H} sequences (such as one or more FR sequences and/or CDR sequences), one or more parts of one or more naturally occurring V_{HH} sequences (such as one or more FR sequences or CDR sequences), and/or one or more synthetic or semi-synthetic sequences, in a suitable manner, so as to provide a Nanobody of the invention or a nucleotide sequence or nucleic acid encoding the same (which may then be suitably expressed). Nucleotide sequences encoding framework sequences of V_{HH} sequences or Nanobodies will be clear to the skilled person based on the disclosure herein and/or the further prior art cited herein (and/or may alternatively be obtained by PCR starting from the nucleotide sequences obtained using the methods described herein) and may be suitably combined with nucleotide sequences that encode the desired CDR's (for example, by PCR assembly using overlapping primers), so as to provide a nucleic acid encoding a Nanobody of the invention.

[1995] As mentioned herein, Nanobodies may in particular be characterized by the presence of one or more “Hallmark residues” (as described herein) in one or more of the framework sequences.

[1996] Thus, according to one preferred, but non-limiting aspect of the invention, a Nanobody in its broadest sense can be generally defined as a polypeptide comprising:
[1997] a) an amino acid sequence that is comprised of four framework regions/sequences interrupted by three complementarity determining regions/sequences, in which the amino acid residue at position 108 according to the Kabat numbering is Q;

[1998] and/or:
[1999] b) an amino acid sequence that is comprised of four framework regions/sequences interrupted by three complementarity determining regions/sequences, in which the amino acid residue at position 45 according to the Kabat numbering is a charged amino acid (as defined herein) or a cysteine residue, and position 44 is preferably an E;

[2000] and/or:
[2001] c) an amino acid sequence that is comprised of four framework regions/sequences interrupted by three complementarity determining regions/sequences, in which the amino acid residue at position 103 according to the Kabat numbering is chosen from the group consisting of P, R and S, and is in particular chosen from the group consisting of R and S.

[2002] Thus, in a first preferred, but non-limiting aspect, a Nanobody of the invention may have the structure
[2003] FR1-CDR1-FR2-CDR2-FR3-CDR3-FR4

[2004] in which FR1 to FR4 refer to framework regions 1 to 4, respectively, and in which CDR1 to CDR3 refer to the complementarity determining regions 1 to 3, respectively, and in which
[2005] a) the amino acid residue at position 108 according to the Kabat numbering is Q;

[2006] and/or in which:
[2007] b) the amino acid residue at position 45 according to the Kabat numbering is a charged amino acid or a cysteine and the amino acid residue at position 44 according to the Kabat numbering is preferably E;

[2008] and/or in which:
[2009] c) the amino acid residue at position 103 according to the Kabat numbering is chosen from the group consisting of P, R and S, and is in particular chosen from the group consisting of R and S;

[2010] and in which:
[2011] d) CDR1, CDR2 and CDR3 are as defined herein, and are preferably as defined according to one of the preferred aspects herein, and are more preferably as defined according to one of the more preferred aspects herein.

[2012] In particular, a Nanobody in its broadest sense can be generally defined as a polypeptide comprising:
[2013] a) an amino acid sequence that is comprised of four framework regions/sequences interrupted by three complementarity determining regions/sequences, in which the amino acid residue at position 108 according to the Kabat numbering is Q;

[2014] and/or:
[2015] b) an amino acid sequence that is comprised of four framework regions/sequences interrupted by three complementarity determining regions/sequences, in which the amino acid residue at position 44 according to the Kabat numbering is E and in which the amino acid residue at position 45 according to the Kabat numbering is an R;

[2016] and/or:
[2017] c) an amino acid sequence that is comprised of four framework regions/sequences interrupted by three complementarity determining regions/sequences, in which the amino acid residue at position 103 according to the Kabat numbering is chosen from the group consisting of P, R and S, and is in particular chosen from the group consisting of R and S.

[2018] Thus, according to a preferred, but non-limiting aspect, a Nanobody of the invention may have the structure
[2019] FR1-CDR1-FR2-CDR2-FR3-CDR3-FR4

[2020] in which FR1 to FR4 refer to framework regions 1 to 4, respectively, and in which CDR1 to CDR3 refer to the complementarity determining regions 1 to 3, respectively, and in which
[2021] a) the amino acid residue at position 108 according to the Kabat numbering is Q;

[2022] and/or in which:
[2023] b) the amino acid residue at position 44 according to the Kabat numbering is E and in which the amino acid residue at position 45 according to the Kabat numbering is an R;

[2024] and/or in which:
[2025] c) the amino acid residue at position 103 according to the Kabat numbering is chosen from the group consisting of P, R and S, and is in particular chosen from the group consisting of R and S;

[2026] and in which:
[2027] d) CDR1, CDR2 and CDR3 are as defined herein, and are preferably as defined according to one of the preferred aspects herein, and are more preferably as defined according to one of the more preferred aspects herein.

[2028] In particular, a Nanobody against heterodimeric cytokines and/or their receptors according to the invention may have the structure:
[2029] FR1-CDR1-FR2-CDR2-FR3-CDR3-FR4

[2030] in which FR1 to FR4 refer to framework regions 1 to 4, respectively, and in which CDR1 to CDR3 refer to the complementarity determining regions 1 to 3, respectively, and in which
[2031] a) the amino acid residue at position 108 according to the Kabat numbering is Q;

[2032] and/or in which:
[2033] b) the amino acid residue at position 44 according to the Kabat numbering is E and in which the amino acid residue at position 45 according to the Kabat numbering is an R;

[2034] and/or in which:
[2035] c) the amino acid residue at position 103 according to the Kabat numbering is chosen from the group consisting of P, R and S, and is in particular chosen from the group consisting of R and S;

[2036] and in which:
[2037] d) CDR1, CDR2 and CDR3 are as defined herein, and are preferably as defined according to one of the preferred aspects herein, and are more preferably as defined according to one of the more preferred aspects herein.

[2038] In particular, according to one preferred, but non-limiting aspect of the invention, a Nanobody can generally be defined as a polypeptide comprising an amino acid sequence that is comprised of four framework regions/sequences interrupted by three complementarity determining regions/sequences, in which;
[2039] a-1) the amino acid residue at position 44 according to the Kabat numbering is chosen from the group consisting of A, G, E, D, G, Q, R, S, L; and is preferably chosen from the group consisting of G, E or Q; and
[2040] a-2) the amino acid residue at position 45 according to the Kabat numbering is chosen from the group consisting of L, R or C; and is preferably chosen from the group consisting of L or R; and
[2041] a-3) the amino acid residue at position 103 according to the Kabat numbering is chosen from the group consisting of W, R or S; and is preferably W or R, and is most preferably W;
[2042] a-4) the amino acid residue at position 108 according to the Kabat numbering is Q;

[2043] or in which:
[2044] b-1) the amino acid residue at position 44 according to the Kabat numbering is chosen from the group consisting of E and Q; and
[2045] b-2) the amino acid residue at position 45 according to the Kabat numbering is R; and
[2046] b-3) the amino acid residue at position 103 according to the Kabat numbering is chosen from the group consisting of W, R and S; and is preferably W;
[2047] b-4) the amino acid residue at position 108 according to the Kabat numbering is chosen from the group consisting of Q and L; and is preferably Q;

[2048] or in which:
[2049] c-1) the amino acid residue at position 44 according to the Kabat numbering is chosen from the group consisting of A, G, E, D, Q, R, S and L; and is preferably chosen from the group consisting of G, E and Q; and
[2050] c-2) the amino acid residue at position 45 according to the Kabat numbering is chosen from the group consisting of L, R and C; and is preferably chosen from the group consisting of L and R; and
[2051] c-3) the amino acid residue at position 103 according to the Kabat numbering is chosen from the group consisting of P, R and S; and is in particular chosen from the group consisting of R and S; and
[2052] c-4) the amino acid residue at position 108 according to the Kabat numbering is chosen from the group consisting of Q and L; is preferably Q;

[2053] and in which
[2054] d) CDR1, CDR2 and CDR3 are as defined herein, and are preferably as defined according to one of the preferred aspects herein, and are more preferably as defined according to one of the more preferred aspects herein.

[2055] Thus, in another preferred, but non-limiting aspect, a Nanobody of the invention may have the structure
[2056] FR1-CDR1-FR2-CDR2-FR3-CDR3-FR4

[2057] in which FR1 to FR4 refer to framework regions 1 to 4, respectively, and in which. CDR1 to CDR3 refer to the complementarity determining regions I to 3, respectively, and in which:
[2058] a-1) the amino acid residue at position 44 according to the Kabat numbering is chosen from the group consisting of A, G, E, D, G, Q, R, S, L; and is preferably chosen from the group consisting of G, E or Q;

[2059] and in which:
[2060] a-2) the amino acid residue at position 45 according to the Kabat numbering is chosen from the group consisting of L, R or C; and is preferably chosen from the group consisting of L or R;

[2061] and in which:
[2062] a-3) the amino acid residue at position 103 according to the Kabat numbering is chosen from the group consisting of W, R or S; and is preferably W or R, and is most preferably W;

[2063] and in which
[2064] a-4) the amino acid residue at position 108 according to the Kabat numbering is Q;

[2065] and in which:
[2066] d) CDR1, CDR2 and CDR3 are as defined herein, and are preferably as defined according to one of the preferred aspects herein, and are more preferably as defined according to one of the more preferred aspects herein.

[2067] In another preferred, but non-limiting aspect, a Nanobody of the invention may have the structure
[2068] FR1-CDR1-FR2-CDR2-FR3-CDR3-FR4

[2069] in which FR1 to FR4 refer to framework regions 1 to 4, respectively, and in which CDR1 to CDR3 refer to the complementarity determining regions 1 to 3, respectively, and in which:
[2070] b-1) the amino acid residue at position 44 according to the Kabat numbering is chosen from the group consisting of E and Q;

[2071] and in which:
[2072] b-2) the amino acid residue at position 45 according to the Kabar numbering is R;

[2073] and in which:
[2074] b-3) the amino acid residue at position 103 according to the Kabat numbering is chosen from the group consisting of W, R and S; and is preferably W;

[2075] and in which:
[2076] b-4) the amino acid residue at position 108 according to the Kabat numbering is chosen from the group consisting of Q and L; and is preferably Q;

[2077] and in which:
[2078] d) CDR1, CDR2 and CDR3 are as defined herein, and are preferably as defined according to one of the preferred aspects herein, and are more preferably as defined according to one of the more preferred aspects herein.

[2079] In another preferred, but non-limiting aspect, a Nanobody of the invention may have the structure
[2080] FR1-CDR1-FR2-CDR2-FR3-CDR3-FR4

[2081] in which FR1 to FR4 refer to framework regions 1 to 4, respectively, and in which CDR1 to CDR3 refer to the complementarity determining regions 1 to 3, respectively, and in which:
[2082] c-1) the amino acid residue at position 44 according to the Kabat numbering is chosen from the group consisting of A, G, E, D, Q, R, S and L; and is preferably chosen from the group consisting of G, E and Q;

[2083] and in which:
[2084] c-2) the amino acid residue at position 45 according to the Kabat numbering is chosen from the group consisting of L, R and C; and is preferably chosen from the group consisting of L and R;

[2085] and in which:
[2086] c-3) the amino acid residue at position 103 according to the Kabat numbering is chosen from the group consisting of P, R and S; and is in particular chosen from the group consisting of R and S;

[2087] and in which:
[2088] c-4) the amino acid residue at position 108 according to the Kabat numbering is chosen from the group consisting of Q and L; is preferably Q;

[2089] and in which:
[2090] d) CDR1, CDR2 and CDR3 are as defined herein, and are preferably as defined according to one of the preferred aspects herein, and are more preferably as defined according to one of the more preferred aspects herein.

[2091] Two particularly preferred, but non-limiting groups of the Nanobodies of the invention are those according to a) above; according to (a-1) to (A-5) above; according to b) above; according to (b-1) to (b-4) above; according to (c) above; and/or according to (c-1) to (c-4) above, in which either:
[2092] i) the amino acid residues at positions 44-47 according to the Kabat numbering form the sequence GLEW (or a GLEW-like sequence as described herein) and the amino acid residue at position 108 is Q;

[2093] or in which:
[2094] ii) the amino acid residues at positions 43-46 according to the Kabat numbering form the sequence KERE or KQRE (or a KERE-like sequence as described) and the amino acid residue at position 108 is Q or L, and is preferably Q.

[2095] Thus, in another preferred, but non-limiting aspect, a Nanobody of the invention may have the structure
[2096] FR1-CDR1-FR2-CDR2-FR3-CDR3-FR4

[2097] in which FR1 to FR4 refer to framework regions 1 to 4, respectively, and in which CDR1 to CDR3 refer to the complementarity determining regions 1 to 3, respectively, and in which:
[2098] i) the amino acid residues at positions 44-47 according to the Kabat numbering form the sequence GLEW (or a GLEW-like sequence as defined herein) and the amino acid residue at position 108 is Q;

[2099] and in which:
[2100] ii) CDR1, CDR2 and CDR3 are as defined herein, and are preferably as defined according to one of the preferred aspects herein, and are more preferably as defined according to one of the more preferred aspects herein.

[2101] In another preferred, but non-limiting aspect, a Nanobody of the invention may have the structure
[2102] FR1-CDR1-FR2-CDR2-FR3-CDR3-FR4

[2103] in which FR1 to FR4 refer to framework regions 1 to 4, respectively, and in which CDR1 to CDR3 refer to the complementarity determining regions 1 to 3, respectively, and in which:
[2104] i) the amino acid residues at positions 43-46 according to the Kabat numbering form the sequence KERE or KQRE (or a KERE-like sequence) and the amino acid residue at position 108 is Q or L, and is preferably Q;

[2105] and in which:
[2106] ii) CDR1, CDR2 and CDR3 are as defined herein, and are preferably as defined according to one of the preferred aspects herein, and are more preferably as defined according to one of the more preferred aspects herein.

[2107] In the Nanobodies of the invention in which the amino acid residues at positions 43-46 according to the Kabat numbering form the sequence KERE or KQRE, the amino acid residue at position 37 is most preferably F. In the Nanobodies of the invention in which the amino acid residues at positions 44-47 according to the Kabat numbering form the sequence GLEW, the amino acid residue at position 37 is chosen from the group consisting of Y, H, I, L, V or F, and is most preferably V.

[2108] Thus, without being limited hereto in any way, on the basis of the amino acid residues present on the positions mentioned above, the Nanobodies of the invention can generally be classified on the basis of the following three groups:
[2109] i) The “GLEW-group”: Nanobodies with the amino acid sequence GLEW at positions 44-47 according to the Kabat numbering and Q at position 108 according to the Kabat numbering. As further described herein, Nanobodies within this group usually have a V at position 37, and can have a W, P, R or S at position 103, and preferably have a W at position 103. The GLEW group also comprises some GLEW-like sequences such as those mentioned in Table A-4 below. More generally, and without limitation, Nanobodies belonging to the GLEW-group can be defined as Nanobodies with a G at position 44 and/or with a W at position 47, in which position 46 is usually E and in which preferably position 45 is not a charged amino acid residue and not cysteine;
[2110] ii) The “KERE-group”: Nanobodies with the amino acid sequence KERE or KQRE (or another KERE-like sequence) at positions 43-46 according to the Kabat numbering and Q or L at position 108 according to the Kabat numbering. As further described herein, Nanobodies within this group usually have a F at position 37, an L or F at position 47; and can have a W, P, R or S at position 103, and preferably have a W at position 103. More generally, and without limitation, Nanobodies belonging to the KERE-group can be defined as Nanobodies with a K, Q or R at position 44 (usually K) in which position 45 is a charged amino acid residue or cysteine, and position 47 is as further defined herein;
[2111] iii) The “103 P, R, S-group”: Nanobodies with a P, R or S at position 103. These Nanobodies can have either the Amino acid sequence GLEW at positions 44-47 according to the Kabat numbering or the amino acid sequence KERE or KQRE at positions 43-46 according to the Kabat numbering, the latter most preferably in combination with an F at position 37 and an L or an F at position 47 (as defined for the KERE-group); and can have Q or L at position 108 according to the Kabat numbering, and preferably have Q.

[2112] Also, where appropriate, Nanobodies may belong to (i.e. have characteristics of) two or more of these classes. For example, one specifically preferred group of Nanobodies has GLEW or a GLEW-like sequence at positions 44-47; P, R or S (and in particular R) at position 103; and Q at position 108 (which may be humanized to L).

[2113] More generally, it should be noted that the definitions referred to above describe and apply to Nanobodies in the form of a native (i.e. non-humanized) V_{HH} sequence, and that humanized variants of these Nanobodies may contain other amino acid residues than those indicated above (i.e. one or more humanizing substitutions as defined herein). For example, and without limitation, in some humanized Nanobodies of the GLEW-group or the 103 P, R, S-group, Q at position 108 may be humanized to 108L. As already mentioned herein, other humanizing substitutions (and suitable combinations thereof) will become clear to the skilled person based on the disclosure herein. In addition, or alternatively, other potentially useful humanizing substitutions can be ascertained by comparing the sequence of the framework regions of a naturally occurring V_{HH} sequence with the corresponding framework sequence of one or more closely related human V_{H} sequences, after which one or more of the potentially useful humanizing substitutions (or combinations thereof) thus determined can be introduced into said V_{HH} sequence (in any manner known per se, as further described herein) and the resulting humanized V_{HH} sequences can be tested for affinity for the target, for stability, for ease and level of expression, and/or for other desired properties. In this way, by means of a limited degree of trial and error, other suitable humanizing substitutions (or suitable combinations thereof) can be determined by the skilled person based on the disclosure herein. Also, based on the foregoing, (the framework regions of) a Nanobody may be partially humanized or fully humanized.

[2114] Thus, in another preferred, but non-limiting aspect, a Nanobody of the invention may be a Nanobody belonging to the GLEW-group (as defined herein), and in which CDR1, CDR2 and CDR3 are as defined herein, and are preferably as defined according to one of the preferred aspects herein, and are more preferably as defined according to one of the more preferred aspects herein.

[2115] In another preferred, but non-limiting aspect, a Nanobody of the invention may be a Nanobody belonging to the KERE-group (as defined herein), and CDR1, CDR2 and CDR3 are as defined herein, and are preferably as defined according to one of the preferred aspects herein, and are more preferably as defined according to one of the more preferred aspects herein.

[2116] Thus, in another preferred, but non-limiting aspect, a Nanobody of the invention may be a Nanobody belonging to the 103 P, R, S-group (as defined herein), and in which CDR1, CDR2 and CDR3 are as defined herein, and are preferably as defined according to one of the preferred aspects herein, and are more preferably as defined according to one of the more preferred aspects herein.

[2117] Also, more generally and in addition to the 108Q, 43E/44R and 103 P, R, S residues mentioned above, the Nanobodies of the invention can contain, at one or more positions that in a conventional V_{H} domain would form (part of) the V_{H}/V_{L} interface, one or more amino acid residues that are more highly charged than the amino acid residues that naturally occur at the same position(s) in the corresponding naturally occurring V_{H} sequence, and in particular one or more charged amino acid residues (as mentioned in Table A-3). Such substitutions include, but are not limited to, the GLEW-like sequences mentioned in Table A-4 below; as well as the substitutions that are described in the International Application WO 00/29004 for so-called “microbodies”, e.g. so as to obtain a Nanobody with Q at position 108 in combination with KLEW at positions 44-47. Other possible substitutions at these positions will be clear to the skilled person based upon the disclosure herein.

[2118] In one aspect of the Nanobodies of the invention, the amino acid residue at position 83 is chosen from the group consisting of L, M, S, V and W; and is preferably L.

[2119] Also, in one aspect of the Nanobodies of the invention, the amino acid residue at position 83 is chosen from the group consisting of R, K, N, E, G, I, T and Q; and is most preferably either K or E (for Nanobodies corresponding to naturally occurring V_{HH} domains) or R (for “humanized” Nanobodies, as described herein). The amino acid residue at position 84 is chosen from the group consisting of P, A, R, S, D T, and V in one aspect, and is most preferably P (for Nanobodies corresponding to naturally occurring V_{HH} domains) or R (for “humanized” Nanobodies, as described herein).

[2120] Furthermore, in one aspect of the Nanobodies of the invention, the amino acid residue at position 104 is chosen from the group consisting of G and D; and is most preferably G.

[2121] Collectively, the amino acid residues at positions 11, 37, 44, 45, 47, 83, 84, 103, 104 and 108, which in the Nanobodies are as mentioned above, will also be referred to herein as the “Hallmark Residues”. The Hallmark Residues and the amino acid residues at the corresponding positions of the most closely related human V_{H} domain, V_{H}3, are summarized in Table A-4.

[2122] Some especially preferred but non-limiting combinations of these Hallmark Residues as occur in naturally occurring V_{HH} domains are mentioned in Table A-5. For comparison, the corresponding amino acid residues of the human V_{H}3 called DP-47 have been indicated in italics.

TABLE A-4
Hallmark Residues in Nanobodies

| Position | Human V_{H}3 | Hallmark Residues |
|---|---|---|
| 11 | L, V; predominantly L | L, M, S, V,W; preferably L |
| 37 | V, I, F; usually V | F⁽¹⁾, Y, H, I, L or V, preferably F⁽¹⁾ or Y |
| 44⁽⁸⁾ | G | G⁽²⁾, E⁽³⁾, A, D, Q, R, S, L; |
| | | preferably G⁽²⁾, E⁽³⁾ or Q; |
| | | most preferably G⁽²⁾ or E⁽³⁾. |
| 45⁽⁸⁾ | L | L⁽²⁾, R⁽³⁾, C, I, L, P, Q, V; preferably L⁽²⁾ or R⁽³⁾ |
| 47⁽⁸⁾ | W, Y | W⁽²⁾, L⁽¹⁾ or F⁽¹⁾, A, G, I, M, R, S, V or Y; |
| | | preferably W⁽²⁾, L⁽¹⁾, F⁽¹⁾ or R |
| 83 | R or K; usually R | R, K⁽⁵⁾, N, E⁽⁵⁾, G, I, M, Q or T; preferably |
| | | K or R; most preferably K |
| 84 | A, T, D; predominantly A | P⁽⁵⁾, A, L, R, S, T, D, V; preferably P |
| 103 | W | W⁽⁴⁾, P⁽⁶⁾, R⁽⁶⁾, S; preferably W |
| 104 | G | G or D; preferably G |
| 108 | L, M or T; predominantly L | Q, L⁽⁷⁾ or R; preferably Q or L⁽⁷⁾ |

Notes:
⁽¹⁾In particular, but not exclusively, in combination with KERE or KQRE at positions 43-46.
⁽²⁾Usually as GLEW at positions 44-47.
⁽³⁾Usually as KERE or KQRE at positions 43-46, e.g. as KEREL, KEREF, KQREL, KQREF or KEREG at positions 43-47. Alternatively, also sequences such as TERE (for example TEREL), KECE (for example KECEL or KECER), RERE (for example REREG), QERE (for example QEREG), KGRE (for example KGREG), KDRE (for example KDREV) are possible. Some other possible, but less preferred sequences include for example DECKL and NVCEL.
⁽⁴⁾With both GLEW at positions 44-47 and KERE or KQRE at positions 43-46.
⁽⁵⁾Often as KP or EP at positions 83-84 of naturally occurring V_{HH} domains.
⁽⁶⁾In particular, but not exclusively, in combination with GLEW at positions 44-47.
⁽⁷⁾With the proviso that when positions 44-47 are GLEW, position 108 is always Q in (non-humanized) V_{HH} sequences that also contain a W at 103.
⁽⁸⁾The GLEW group also contains GLEW-like sequences at positions 44-47, such as for example GVEW, EPEW, GLER, DQEW, DLEW, GIEW, ELEW, GPEW, EWLP, GPER, GLER and ELEW.

TABLE A-5
Some preferred but non-limiting combinations of Hallmark
Residues in naturally occurring Nanobodies.

| | 11 | 37 | 44 | 45 | 47 | 83 | 84 | 103 | 104 | 108 |
|---|---|---|---|---|---|---|---|---|---|---|
| DP-47 (human) | M | V | G | L | W | R | A | W | G | L |
| “KERE” group | L | F | E | R | L | K | P | W | G | Q |
| | L | F | E | R | F | E | P | W | G | Q |
| | L | F | E | R | F | K | P | W | G | Q |
| | L | Y | Q | R | L | K | P | W | G | Q |
| | L | F | L | R | V | K | P | Q | G | Q |
| | L | F | Q | R | L | K | P | W | G | Q |
| | L | F | E | R | F | K | P | W | G | Q |
| “GLEW” group | L | V | G | L | W | K | S | W | G | Q |
| | M | V | G | L | W | K | P | R | G | Q |

For humanization of these combinations, reference is made to the specification.

[2123] In the Nanobodies, each amino acid residue at any other position than the Hallmark Residues can be any amino acid residue that naturally occurs at the corresponding position (according to the Kabat numbering) of a naturally occurring V_{HH} domain.

[2124] Such amino acid residues will be clear to the skilled person. Tables A-6 to A-9 mention some non-limiting residues that can be present at each position (according to the Kabat numbering) of the FR1, FR2, FR3 and FR4 of naturally occurring V_{HH} domains. For each position, the amino acid residue that most frequently occurs at each position of a naturally occurring V_{HH} domain (and which is the most preferred amino acid residue for said position in a Nanobody) is indicated in bold; and other preferred amino acid residues for each position have been underlined (note: the number of amino acid residues that are found at positions 26-30 of naturally occurring V_{HH} domains supports the hypothesis underlying the numbering by Chothia (supra) that the residues at these positions already form part of CDR1.)

[2125] In Tables A-6-A-9, some of the non-limiting residues that can be present at each position of a human V_{H}3 domain have also been mentioned. Again, for each position, the amino acid residue that most frequently occurs at each position of a naturally occurring human V_{H}3 domain is indicated in bold; and other preferred amino acid residues have been underlined.

[2126] For reference only, Tables A-6-A-9 also contain data on the V_{HH} entropy (“V_{HH} Ent.”) and V_{HH} variability (“V_{HH} Var.”) at each amino acid position for a representative sample of 1118 V_{HH} sequences (data kindly provided by David Lutje Hulsing and Prof. Theo Verrips of Utrecht University). The values for the V_{HH} entropy and the V_{HH} variability provide a measure for the variability and degree of conservation of amino acid residues between the 1118 V_{HH} sequences analyzed: low values (i.e. <1, such as <0.5) indicate that an amino acid residue is highly conserved between the V_{HH} sequences (i.e. little variability). For example, the G at position 8 and the G at position 9 have values for the V_{HH} entropy of 0.1 and 0 respectively, indicating that these residues are highly conserved and have little variability (and in case of position 9 is Gin all 1118 sequences analysed), whereas for residues that form part of the CDR's generally values of 1.5 or more are found (data not shown). Note that (1) the amino acid residues listed in the second column of Tables A-6-A-9 are based on a bigger sample than the 1118 V_{HH} sequences that were analysed for determining the V_{HH} entropy and V_{HH} variability referred to in the last two columns; and (2) the data represented below support the hypothesis that the amino acid residues at positions 27-30 and maybe even also at positions 93 and 94 already form part of the CDR's (although the invention is not limited to any specific hypothesis or explanation, and as mentioned above, herein the numbering according to Kabat is used). For a general explanation of sequence entropy, sequence variability and the methodology for determining the same, see Oliveira et al., PROTEINS: Structure, Function and Genetics, 52: 544-552 (2003).

TABLE A-6
Non-limiting examples of amino acid residues in FR1
(for the footnotes, see the footnotes to Table A-4)

| | Amino acid residue(s): | | V_{HH} | V_{HH} |
|---|---|---|---|---|
| Pos. | Human V_{H}3 | Camelid V_{HH}'s | Ent. | Var. |
| 1 | E, Q | Q, A, E | — | — |
| 2 | V | V | 0.2 | 1 |
| 3 | Q | Q, K | 0.3 | 2 |
| 4 | L | L | 0.1 | 1 |
| 5 | V, L | Q, E, L, V | 0.8 | 3 |
| 6 | E | E, D, Q, A | 0.8 | 4 |
| 7 | S, T | S, F | 0.3 | 2 |
| 8 | G, R | G | 0.1 | 1 |
| 9 | G | G | 0 | 1 |
| 10 | G, V | G, D, R | 0.3 | 2 |
| 11 | Hallmark residue: L, M, S, V, W; preferably L | | 0.8 | 2 |
| 12 | V, I | V, A | 0.2 | 2 |
| 13 | Q, K, R | Q, E, K, P, R | 0.4 | 4 |
| 14 | P | A, Q, A, G, P, S, T, V | 1 | 5 |
| 15 | G | G | 0 | 1 |
| 16 | G, R | G, A, E, D | 0.4 | 3 |
| 17 | S | S, F | 0.5 | 2 |
| 18 | L | L, V | 0.1 | 1 |
| 19 | R, K | R, K, L, N, S, T | 0.6 | 4 |
| 20 | L | L, F, I, V | 0.5 | 4 |
| 21 | S | S, A, F, T | 0.2 | 3 |
| 22 | C | C | 0 | 1 |
| 23 | A, T | A, D, E, P, S, T, V | 1.3 | 5 |
| 24 | A | A, I, L, S, T, V | 1 | 6 |
| 25 | S | S, A, F, P, T | 0.5 | 5 |
| 26 | G | G, A, D, E, R, S, T, V | 0.7 | 7 |
| 27 | F | S, F, R, L, P, G, N, | 2.3 | 13 |
| 28 | T | N, T, E, D, S, I, R, A, G, R, F, Y | 1.7 | 11 |
| 29 | F, V | F, L, D, S, I, G, V, A | 1.9 | 11 |
| 30 | S, D, G | N, S, E, G, A, D, M, T | 1.8 | 11 |

TABLE A-7
Non-limiting examples of amino acid residues in FR2
(for the footnotes, see the footnotes to Table A-4)

| | Amino acid residue(s): | | V_{HH} | V_{HH} |
|---|---|---|---|---|
| Pos. | Human V_{H}3 | Camelid V_{HH}'s | Ent. | Var. |
| 36 | W | W | 0.1 | 1 |
| 37 | Hallmark residue: F⁽¹⁾, H, I, L, Y | | 1.1 | 6 |
| | or V, preferably F⁽¹⁾ or Y | | | |
| 38 | R | R | 0.2 | 1 |
| 39 | Q | Q, H, P, R | 0.3 | 2 |
| 40 | A | A, F, G, L, P, T, V | 0.9 | 7 |
| 41 | P, S, T | P, A, L, S | 0.4 | 3 |
| 42 | G | G, E | 0.2 | 2 |
| 43 | K | K, D, E, N, Q, R, T, V | 0.7 | 6 |
| 44 | Hallmark residue: G⁽²⁾, E⁽³⁾, A, D, Q, | | 1.3 | 5 |
| | R, S, L; preferably G⁽²⁾, E⁽³⁾ or | | | |
| | Q; most preferably G⁽²⁾ or E⁽³⁾. | | | |
| 45 | Hallmark residue: L⁽²⁾, R⁽³⁾, C, I, L, P, Q, V; | | 0.6 | 4 |
| | preferably L⁽²⁾ or R⁽³⁾ | | | |
| 46 | E, V | E, D, K, Q, V | 0.4 | 2 |
| 47 | Hallmark residue: W⁽²⁾, L⁽¹⁾ or F⁽¹⁾, A, G, I, | | 1.9 | 9 |
| | M, R, S, V or Y; preferably W⁽²⁾, L⁽¹⁾, F⁽¹⁾ or R | | | |
| 48 | V | V, I, L | 0.4 | 3 |
| 49 | S, A, G | A, S, G, T, V | 0.8 | 3 |

TABLE A-8
Non-limiting examples of amino acid residues in FR3
(for the footnotes, see the footnotes to Table A-4)

| | Amino acid residue(s): | | V_{HH} | V_{HH} |
|---|---|---|---|---|
| Pos. | Human V_{H}3 | Camelid V_{HH}'s | Ent. | Var. |
| 66 | R | R | 0.1 | 1 |
| 67 | F | F, L, V | 0.1 | 1 |
| 68 | T | T, A, N, S | 0.5 | 4 |
| 69 | I | I, L, M, V | 0.4 | 4 |
| 70 | S | S, A, F, T | 0.3 | 4 |
| 71 | R | R, G, H, I, L, K, Q, S, T, W | 1.2 | 8 |
| 72 | D, E | D, E, G, N, V | 0.5 | 4 |
| 73 | N, D, G | N, A, D, F, I, K, L, R, S, T, V, Y | 1.2 | 9 |
| 74 | A, S | A, D, G, N, P, S, T, V | 1 | 7 |
| 75 | K | K, A, E, K, L, N, Q, R | 0.9 | 6 |
| 76 | N, S | N, D, K, R, S, T, Y | 0.9 | 6 |
| 77 | S, T, I | T, A, E, I, M, P, S | 0.8 | 5 |
| 78 | L, A | V, L, A, F, G, I, M | 1.2 | 5 |
| 79 | Y, H | Y, A, D, F, H, N, S, T | 1 | 7 |
| 80 | L | L, F, V | 0.1 | 1 |
| 81 | Q | Q, E, I, L, R, T | 0.6 | 5 |
| 82 | M | M, I, L, V | 0.2 | 2 |
| 82a | N, G | N, D, G, H, S, T | 0.8 | 4 |
| 82b | S | S, N, D, G, R, T | 1 | 6 |
| 82c | L | L, P, V | 0.1 | 2 |
| 83 | Hallmark residue: R, K⁽⁵⁾, N, E⁽⁵⁾, G, I, M, Q or T; | | 0.9 | 7 |
| | preferably K or R; most preferably K | | | |
| 84 | Hallmark residue: P⁽⁵⁾, A, D, L, R, S, T, V; | | 0.7 | 6 |
| | preferably P | | | |
| 85 | E, G | E, D, G, Q | 0.5 | 3 |
| 86 | D | D | 0 | 1 |
| 87 | T, M | T, A, S | 0.2 | 3 |
| 88 | A | A, G, S | 0.3 | 2 |
| 89 | V, L | V, A, D, I, L, M, N, R, T | 1.4 | 6 |
| 90 | Y | Y, F | 0 | 1 |
| 91 | Y, H | Y, D, F, H, L, S, T, V | 0.6 | 4 |
| 92 | C | C | 0 | 1 |
| 93 | A, K, T | A, N, G, H, K, N, R, S, T, V, Y | 1.4 | 10 |
| 94 | K, R, T | A, V, C, F, G, I, K, L, R, S or T | 1.6 | 9 |

TABLE A-9
Non-limiting examples of amino acid residues in FR4
(for the footnotes, see the footnotes to Table A-4)

| | Amino acid residue(s): | | V_{HH} | V_{HH} |
|---|---|---|---|---|
| Pos. | Human V_{H}3 | Camelid V_{HH}'s | Ent. | Var. |
| 103 | Hallmark residue: W⁽⁴⁾, P⁽⁶⁾, R⁽⁶⁾, S; preferably W | | 0.4 | 2 |
| 104 | Hallmark residue: G or D; preferably G | | 0.1 | 1 |
| 105 | Q, R | Q, E, K, P, R | 0.6 | 4 |
| 106 | G | G | 0.1 | 1 |
| 107 | T | T, A, I | 0.3 | 2 |
| 108 | Hallmark residue: Q, L⁽⁷⁾ or R: preferably Q or L⁽⁷⁾ | | 0.4 | 3 |
| 109 | V | V | 0.1 | 1 |
| 110 | T | T, I, A | 0.2 | 1 |
| 111 | V | V, A, I | 0.3 | 2 |
| 112 | S | S, F | 0.3 | 1 |
| 113 | S | S, A, L, P, T | 0.4 | 3 |

[2127] Thus, in another preferred, but not limiting aspect, a Nanobody of the invention can be defined as an amino acid sequence with the (general) structure
[2128] FR1-CDR1-FR2-CDR2-FR3-CDR3-FR4

[2129] in which FR1 to FR4 refer to framework regions 1 to 4, respectively, and in which CDR1 to CDR3 refer to the complementarily determining regions 1 to 3, respectively, and in which:
[2130] i) one or more of the amino acid residues at positions 11, 37, 44, 45, 47, 83, 84, 103, 104 and 108 according to the Kabat numbering are chosen from the Hallmark residues mentioned in Table A-4;

[2131] and in which:
[2132] ii) CDR1, CDR2 and CDR3 are as defined herein, and are preferably as defined according to one of the preferred aspects herein, and are more preferably as defined according to one of the more preferred aspects herein.

[2133] The above Nanobodies may for example be V_{HH} sequences or may be humanized Nanobodies. When the above Nanobody sequences are V_{HH} sequences, they may be suitably humanized, as further described herein. When the Nanobodies are partially humanized Nanobodies, they may optionally be further suitably humanized, again as described herein.

[2134] In particular, a Nanobody of the invention can be an amino acid sequence with the (general) structure
[2135] FR1-CDR1-FR2-CDR2-FR3-CDR3-FR4

[2136] in which FR1 to FR4 refer to framework regions 1 to 4, respectively, and in which CDR1 to CDR3 refer to the complementarity determining regions 1 to 3, respectively, and in which:
[2137] i) (preferably) one or more of the amino acid residues at positions 11, 37, 44, 45, 47, 83, 84, 103, 104 and 108 according to the Kabat numbering are chosen from the Hallmark residues mentioned in Table A-4 (it being understood that V_{HH} sequences will contain one or more Hallmark residues; and that partially humanized Nanobodies will usually, and preferably, [still] contain one or more Hallmark residues [although it is also within the scope of the invention to provide—where suitable in accordance with the invention—partially humanized Nanobodies in which all Hallmark residues, but not one or more of the other amino acid residues, have been humanized]; and that in fully humanized Nanobodies, where suitable in accordance with the invention, all amino acid residues at the positions of the Hallmark residues will be amino acid residues that occur in a human V_{H}3 sequence. As will be clear to the skilled person based on the disclosure herein that such V_{HH} sequences, such partially humanized Nanobodies with at least one Hallmark residue, such partially humanized Nanobodies without Hallmark residues and such fully humanized Nanobodies all form aspects of this invention);

[2138] and in which:
[2139] ii) said amino acid sequence has at least 80% amino acid identity with at least one of the amino acid sequences of SEQ ID NO's: 1 to 22, in which for the purposes of determining the degree of amino acid identity, the amino acid residues that form the CDR sequences (indicated with X in the sequences of SEQ ID NO's: 1 to 22) are disregarded;

[2140] and in which:
[2141] iii) CDR1, CDR2 and CDR3 are as defined herein, and are preferably as defined according to one of the preferred aspects herein, and are more preferably as defined according to one of the more preferred aspects herein.

[2142] The above Nanobodies may for example be V_{HH} sequences or may be humanized Nanobodies. When the above Nanobody sequences are V_{HH} sequences, they may be suitably humanized, as further described herein. When the Nanobodies are partially humanized Nanobodies, they may optionally be further suitably humanized, again as described herein.

TABLE A-10

Representative amino acid sequences for Nanobodies of the KERE, GLEW and P, R, S 103 group.
The CDR's are indicated with XXXX

| | | |
|---|---|---|
| KERE sequence no. 1 | SEQ ID NO: 1 | EVQLVESGGGLVQPGGSLRLSCAASGIPFSXXXXXWFRQAPGKQRDSVAXXXXXRFTISRDNAKN |
| | | TVYLQMNSLKPEDTAVYRCYFXXXXXWGQGTQVTVSS |
| KERE sequence no. 2 | SEQ ID NO: 2 | QVKLEESGGGLVQAGGSLRLSCVGSGRTFSXXXXXWFRLAPGKEREFVAXXXXXRFTISRDTASNR |
| | | GYLHMNNLTPEDTAVYYCAAXXXXXWGQGTQVTVSS |
| KERE sequence no. 3 | SEQ ID NO: 3 | AVQLVDSGGGLVQAGDSLKLSCALTGGAFTXXXXXWFRQTPGREREFVAXXXXXRFTISRDNAKN |
| | | MVYLRMNSLIPEDAAVYSCAAXXXXXWGQGTLVTVSS |
| KERE sequence no. 4 | SEQ ID NO: 4 | QVQLVESGGGLVEAGGSLRLSCTASESPFRXXXXXWFRQTSGQEREFVAXXXXXRFTISRDDAKNT |
| | | VWLHGSTLKPEDTAVYYCAAXXXXXWGQGTQVTVSS |
| KERE sequence no. 5 | SEQ ID NO: 5 | AVQLVESGGGLVQGGGSLRLACAASERIFDXXXXXWYRQGPGNERELVAXXXXXRFTISMDYTKQ |
| | | TVYLHMNSLRPEDTGLYYCKIXXXXXWGQGTQVTVSS |
| KERE sequence no. 6 | SEQ ID NO: 6 | DVKFVESGGGLVQAGGSLRLSCVASGFNFDXXXXXWFRQAPGKEREEVAXXXXXRFTISSEKDKN |
| | | SVYLQMNSLKPEDTALYICAGXXXXXWGRGTQVTVSS |
| KERE sequence no. 7 | SEQ ID NO: 7 | QVRLAESGGGLVQSGGSLRLSCVASGSTYTXXXXXWYRQYPGKQRALVAXXXXXRFTIARDSTKDT |
| | | FCLQMNNLKPEDTAVYYCYAXXXXXWGQGTQVTVSS |
| KERE sequence no. 8 | SEQ ID NO: 8 | EVQLVESGGGLVQAGGSLRLSCAASGFTSDXXXXXWFRQAPGKPREGVSXXXXXRFTISTDNAKN |
| | | TVHLLMNRVNAEDTALYYCAVXXXXXWGRGTRVTVSS |
| KERE sequence no. 9 | SEQ ID NO: 9 | QVQLVESGGGLVQPGGSLRLSCQASGDISTXXXXXWYRQVPGKLREFVAXXXXXRFTISGDNAKR |
| | | AIYLQMNNLKPDDTAVYYCNRXXXXXWGQGTQVTVSP |
| KERE sequence no. 10 | SEQ ID NO: 10 | QVPVVESGGGLVQAGDSLRLFCAVPSFTSTXXXXXWFRQAPGKEREFVAXXXXXRFTISRNATKNT |
| | | LTLRMDSLKPEDTAVYYCAAXXXXXWGQGTQVTVSS |
| KERE sequence no. 11 | SEQ ID NO: 11 | EVQLVESGGGLVQAGDSLRLFCTVSGGTASXXXXXWFRQAPGEKREFVAXXXXXRFTIARENAGN |
| | | MVYLQMNNLKPDDTALYTCAAXXXXXWGRGTQVTVSS |
| KERE sequence no. 12 | SEQ ID NO: 12 | AVQLVESGGDSVQPGDSQTLSCAASGRTNSXXXXXWFRQAPGKERVFLAXXXXXRFTISRDSAKN |
| | | MMYLQMNNLKPQDTAVYYCAAXXXXXWGQGTQVTVSS |
| KERE sequence no. 13 | SEQ ID NO: 13 | AVQLVESGGGLVQAGGSLRLSCVVSGLTSSXXXXXWFRQTPWQERDFVAXXXXXRFTISRDNYKD |
| | | TVLLEMNFLKPEDTAIYYCAAXXXXXWGQGTQVTVSS |
| KERE sequence no. 14 | SEQ ID NO: 14 | AVQLVESGGGLVQAGASLRLSCATSTRTLDXXXXXWFRQAPGRDREFVAXXXXXRFTVSRDSAEN |
| | | TVALQMNSLKPEDTAVYYCAAXXXXXWGQGTRVTVSS |
| KERE sequence no. 15 | SEQ ID NO: 15 | QVQLVESGGGLVQPGGSLRLSCTVSRLTAHXXXXXWFRQAPGKEREAVSXXXXXRFTISRDYAGN |
| | | TAFLQMDSLKPEDTGVYYCATXXXXXWGQGTQVTVSS |
| KERE sequence no. 16 | SEQ ID NO: 16 | EVQLVESGGELVQAGGSLKLSCTASGRNFVXXXXXWFRRAPGKEREFVAXXXXXRFTVSRDNGKN |
| | | TAYLRMNSLKPEDTADYYCAVXXXXXLGSGTQVTVSS |
| GLEW sequence no. 1 | SEQ ID NO: 17 | AVQLVESGGGLVQPGGSLRLSCAASGFTFSXXXXXWVRQAPGKVLEWVSXXXXXRFTISRDNAKN |
| | | TLYLQMNSLKPEDTAVYYCVKXXXXXGSQGTQVTVSS |
| GLEW sequence no. 2 | SEQ ID NO: 18 | EVQLVESGGGLVQPGGSLRLSCVCVSSGCTXXXXXWVRQAPGKAEEWVSXXXXXRFKISRDNAKK |
| | | TLYLQMNSLGPEDTAMYYCQRXXXXXRGQGTQVTVSS |
| GLEW sequence no. 3 | SEQ ID NO: 19 | EVQLVESGGGLALPGGSLTLSCVFSGSTFSXXXXXWVRHTPGKAEEWVSXXXXXRFTISRDNAKNT |
| | | LYLEMNSLSPEDTAMYYCGRXXXXXRSKGIQVTVSS |
| P, R, S 103 | SEQ ID NO: 20 | AVQLVESGGGLVQAGGSLRLSCAASGRTFSXXXXXWFRQAPGKEREFVAXXXXXRFTISRDNAKN |
| sequence no. 1 | | TVYLQMNSLKPEDTAVYYCAAXXXXXRGQGTQVTVSS |
| P, R, S 103 | SEQ ID NO: 21 | DVQLVESGGDLVQPGGSLRLSCAASGFSFDXXXXXWLRQTPGKGLEWVGXXXXXRFTISRDNAK |
| sequence no. 2 | | NMLYLHLNNLKSEDTAVYYCRRXXXXXLGQGTQVTVSS |
| P, R, S 103 | SEQ ID NO: 22 | EVQLVESGGGLVQPGGSLRLSCVCVSSGCTXXXXXWVRQAPGKAEEWVSXXXXXRFKISRDNAKK |
| sequence no. 3 | | TLYLQMNSLGPEDTAMYYCQRXXXXXRGQGTQVTVSS |

[2143] In particular, a Nanobody of the invention of the KERE group can be an amino acid sequence with the (general) structure
[2144] FR1-CDR1-FR2-CDR2-FR3-CDR3-FR4

[2145] in which:
[2146] i) the amino acid residue at position 45 according to the Kabat numbering is a charged amino acid (as defined herein) or a cysteine residue, and position 44 is preferably an E;

[2147] and in which:
[2148] ii) FR1 is an amino acid sequence that has at least 80% amino acid identity with at least one of the following amino acid sequences:

TABLE A-11
Representative FW1 sequences for Nanobodies of the KERE-group.

| | | |
|---|---|---|
| KERE FW1 sequence no. 1 | SEQ ID NO: 23 | QVQRVESGGGLVQAGGSLRLSCAASGRTSS |
| KERE FW1 sequence no. 2 | SEQ ID NO: 24 | QVQLVESGGGLVQTGDSLSLSCSASGRTFS |
| KERE FW1 sequence no. 3 | SEQ ID NO: 25 | QVKLEESGGGLVQAGDSLRLSCAATGRAFG |
| KERE FW1 sequence no. 4 | SEQ ID NO: 26 | AVQLVESGGGLVQPGESLGLSCVASGRDFV |
| KERE FW1 sequence no. 5 | SEQ ID NO: 27 | EVQLVESGGGLVQAGGSLRLSCEVLGRTAG |
| KERE FW1 sequence no. 6 | SEQ ID NO: 28 | QVQLVESGGGWVQPGGSLRLSCAASETILS |
| KERE FW1 sequence no. 7 | SEQ ID NO: 29 | QVQLVESGGGTVQPGGSLNLSCVASGNTFN |
| KERE FW1 sequence no. 8 | SEQ ID NO: 30 | EVQLVESGGGLAQPGGSLQLSCSAPGFTLD |
| KERE FW1 sequence no. 9 | SEQ ID NO: 31 | AQELEESGGGLVQAGGSLRLSCAASGRTFN |

[2149] and in which:
[2150] iii) FR2 is an amino acid sequence that has at least 80% amino acid identity with at least one of the following amino acid sequences:

TABLE A-12
Representative FW2 sequences for
Nanobodies of the KERE-group.

| | | |
|---|---|---|
| KERE FW2 | SEQ ID NO: 41 | WFRQAPGKEREFVA |
| sequence no. 1 | | |
| KERE FW2 | SEQ ID NO: 42 | WFRQTPGREREFVA |
| sequence no. 2 | | |
| KERE FW2 | SEQ ID NO: 43 | WYRQAPGKQREMVA |
| sequence no. 3 | | |
| KERE FW2 | SEQ ID NO: 44 | WYRQGPGKQRELVA |
| sequence no. 4 | | |
| KERE FW2 | SEQ ID NO: 45 | WIRQAPGKEREGVS |
| sequence no. 5 | | |
| KERE FW2 | SEQ ID NO: 46 | WFREAPGKEREGIS |
| sequence no. 6 | | |
| KERE FW2 | SEQ ID NO: 47 | WYRQAPGKERDLVA |
| sequence no. 7 | | |
| KERE FW2 | SEQ ID NO: 48 | WFRQAPGKQREEVS |
| sequence no. 8 | | |
| KERE FW2 | SEQ ID NO: 49 | WFRQPPGKVREFVG |
| sequence no. 9 | | |

[2151] and in which:
[2152] iv) FR3 is an amino acid sequence that has at least 80% amino acid identity with at least one of the following amino acid sequences:

TABLE A-13
Representative FW3 sequences for Nanobodies of the KERE-group.

| | | |
|---|---|---|
| KERE FW3 sequence no. 1 | SEQ ID NO: 50 | RFTISRDNAKNTVYLQMNSLKPEDTAVYRCYF |
| KERE FW3 sequence no. 2 | SEQ ID NO: 51 | RFAISRDNNKNTGYLQMNSLEPEDTAVYYCAA |
| KERE FW3 sequence no. 3 | SEQ ID NO: 52 | RFTVARNNAKNTVNLEMNSLKPEDTAVYYCAA |
| KERE FW3 sequence no. 4 | SEQ ID NO: 53 | RFTISRDIAKNTVDLLMNNLEPEDTAVYYCAA |
| KERE FW3 sequence no. 5 | SEQ ID NO: 54 | RLTISRDNAVDTMYLQMNSLKPEDTAVYYCAA |
| KERE FW3 sequence no. 6 | SEQ ID NO: 55 | RFTISRDNAKNTVYLQMDNVKPEDTAIYYCAA |
| KERE FW3 sequence no. 7 | SEQ ID NO: 56 | RFTISKDSGKNTVYLQMTSLKPEDTAVYYCAT |
| KERE FW3 sequence no. 8 | SEQ ID NO: 57 | RFTISRDSAKNMMYLQMNNLKPQDTAVYYCAA |
| KERE FW3 sequence no. 9 | SEQ ID NO: 58 | RFTISRENDKSTVYLQLNSLKPEDTAVYYCAA |
| KERE FW3 sequence no. 10 | SEQ 1D NO: 59 | RFTISRDYAGNTAYLQMNSLKPEDTGVYYCAT |

[2153] and in which:
[2154] v) FR4 is an amino acid sequence that has at least 80% amino acid identity with at least one of the following amino acid sequences:

TABLE A-14
Representative FW4 sequences for
Nanobodies of the KERE-group.

| | | |
|---|---|---|
| KERE FW4 sequence no. 1 | SEQ ID NO: 60 | WGQGTQVTVSS |
| KERE FW4 sequence no. 2 | SEQ ID NO: 61 | WGKGTLVTVSS |
| KERE FW4 sequence no. 3 | SEQ ID NO: 62 | RGQGTRVTVSS |
| KERE FW4 sequence no. 4 | SEQ ID NO: 63 | WGLGTQVTISS |

[2155] and in which:
[2156] vi) CDR1, CDR2 and CDR3 are as defined herein, and are preferably as defined according to one of the preferred aspects herein, and are more preferably as defined according to one of the more preferred aspects herein.

[2157] In the above Nanobodies, one or more of the further Hallmark residues are preferably as described herein (for example, when they are V_{HH} sequences or partially humanized Nanobodies).

[2158] Also, the above Nanobodies may for example be V_{HH} sequences or may be humanized Nanobodies. When the above Nanobody sequences are V_{HH} sequences, they may be suitably humanized, as further described herein. When the Nanobodies are partially humanized Nanobodies, they may optionally be further suitably humanized, again as described herein.

[2159] With regard to framework 1, it will be clear to the skilled person that, when an amino acid sequence as outlined above is generated by expression of a nucleotide sequence, the first four amino acid sequences (i.e. amino acid residues 1-4 according to the Kabat numbering) may often be determined by the primer(s) that have been used to generate said nucleic acid. Thus, for determining the degree of amino acid identity, the first four amino acid residues are preferably disregarded.

[2160] Also, with regard to framework 1, and although amino acid positions 27 to 30 are according to the Kabat numbering considered to be part of the framework regions (and not the CDR's), it has been found by analysis of a database of more than 1000 V_{HH} sequences that the positions 27 to 30 have a variability (expressed in terms of V_{HH} entropy and V_{HH} variability—see Tables A-6 to A-9) that is much greater than the variability on positions 1 to 26. Because of this, for determining the degree of amino acid identity, the amino acid residues at positions 27 to 30 are preferably also disregarded.

[2161] In view of this, a Nanobody of the KERE class may be an amino acid sequence that is comprised of four framework regions/sequences interrupted by three complementarity determining regions/sequences, in which:
[2162] i) the amino acid residue at position 45 according to the Kabat numbering is a charged amino acid (as defined herein) or a cysteine residue, and position 44 is preferably an E; and in which:
[2163] ii) FR1 is an amino acid sequence that, on positions 5 to 26 of the Kabat numbering, has at least 80% amino acid identity with at least one of the following amino acid sequences:

TABLE A-15

Representative FW1 sequences (amino acid residues
5 to 26) for Nanobodies of the KERE-group.

| | | |
|---|---|---|
| KERE FW1 sequence no. 10 | SEQ ID NO: 32 | VESGGGLVQPGGSLRLSCAASG |
| KERE FW1 sequence no. 11 | SEQ ID NO: 33 | VDSGGGLVQAGDSLKLSCALTG |
| KERE FW1 sequence no. 12 | SEQ ID NO: 34 | VDSGGGLVQAGDSLRLSCAASG |
| KERE FW1 sequence no. 13 | SEQ ID NO: 35 | VDSGGGLVEAGGSLRLSCQVSE |
| KERE FW1 sequence no. 14 | SEQ ID NO: 36 | QDSGGGSVQAGGSLKLSCAASG |
| KERE FW1 sequence no. 15 | SEQ ID NO: 37 | VQSGGRLVQAGDSLRLSCAASE |
| KERE FW1 sequence no. 16 | SEQ ID NO: 38 | VESGGTLVQSGDSLKLSCASST |
| KERE FW1 sequence no. 17 | SEQ ID NO: 39 | MESGGDSVQSGGSLTLSCVASG |
| KERE FW1 sequence no. 18 | SEQ ID NO: 40 | QASGGGLVQAGGSLRLSCSASV |

[2164] and in which:
[2165] iii) FR2, FR3 and FR4 are as mentioned herein for FR2, FR3 and FR4 of Nanobodies of the KERE-class;
   [2166] and in which:
[2167] CDR1, CDR2 and CDR3 are as defined herein, and are preferably as defined according to one of the preferred aspects herein, and are more preferably as defined according to one of the more preferred aspects herein.

[2168] The above Nanobodies may for example be V_{HH} sequences or may be humanised Nanobodies. When the above Nanobody sequences are V_{HH} sequences, they may be suitably humanized, as further described herein. When the Nanobodies are partially humanized Nanobodies, they may optionally be further suitably humanized, again as described herein.

[2169] A Nanobody of the GLEW class may be an amino acid sequence that is comprised of four framework regions/sequences interrupted by three complementarity determining regions/sequences, in which
[2170] i) preferably, when the Nanobody of the GLEW-class is a non-humanized Nanobody, the amino acid residue in position 108 is Q;
[2171] ii) FR1 is an amino acid sequence that has at least 80% amino acid identity with at least one of the following amino acid sequences:

TABLE A-16
Representative FW1 sequences for Nanobodies of the GLEW-group.

| | | |
|---|---|---|
| GLEW FW1 sequence no. 1 | SEQ ID NO: 64 | QVQLVESGGGLVQPGGSLRLSCAASGFTFS |
| GLEW FW1 sequence no. 2 | SEQ ID NO: 65 | EVHLVESGGGLVRPGGSLRLSCAAFGFIFK |
| GLEW FW1 sequence no. 3 | SEQ ID NO: 66 | QVKLEESGGGLAQPGGSLRLSCVASGFTFS |
| GLEW FW1 sequence no. 4 | SEQ ID NO: 67 | EVQLVESGGGLVQPGGSLRLSCVCVSSGCT |
| GLEW FW1 sequence no. 5 | SEQ ID NO: 68 | EVQLVESGGGLALPGGSLTLSCVFSGSTFS |

[2172] and in which:
[2173] iii) FR2 is an amino acid sequence that has at least 80% amino acid identity with at least one of the following amino acid sequences:

TABLE A-17
Representative FW2 sequences for
Nanobodies of the GLEW-group.

| | | |
|---|---|---|
| GLEW FW2 | SEQ ID NO: 72 | WVROAPGKVLEWVS |
| sequence no. 1 | | |
| GLEW FW2 | SEQ ID NO: 73 | WVRRPPGKGLEWVS |
| sequence no. 2 | | |
| GLEW FW2 | SEQ ID NO: 74 | WVRQAPGMGLEWVS |
| sequence no. 3 | | |
| GLEW FW2 | SEQ ID NO: 75 | WVRQAPGKEPEWVS |
| sequence no. 4 | | |
| GLEW FW2 | SEQ ID NO: 76 | WVRQAPGKDQEWVS |
| sequence no. 5 | | |
| GLEW FW2 | SEQ ID NO: 77 | WVRQAPGKAEEWVS |
| sequence no. 6 | | |
| GLEW FW2 | SEQ ID NO: 78 | WVRQAPGKGLEWVA |
| sequence no. 7 | | |
| GLEW FW2 | SEQ ID NO: 79 | WVRQAPGRATEWVS |
| sequence no. 8 | | |

[2174] and in which:
[2175] iv) FR3 is an amino acid sequence that has at least 80% amino acid identity with at least one of the following amino acid sequences:

TABLE A-18
Representative FW3 sequences for Nanobodies of the GLEW-group.

| | | |
|---|---|---|
| GLEW FW3 sequence no. 1 | SEQ ID NO: 80 | RFTISRDNAKNTLYLQMNSLKPEDTAVYYCVK |
| GLEW FW3 sequence no. 2 | SEQ ID NO: 81 | RFTISRDNARNTLYLQMDSLIPEDTALYYCAR |
| GLEW FW3 sequence no. 3 | SEQ ID NO: 82 | RFTSSRDNAKSTLYLQMNDLKPEDTALYYCAR |
| GLEW FW3 sequence no. 4 | SEQ ID NO: 83 | RFIISRDNAKNTLYLQMNSLGPEDTAMYYCQR |
| GLEW FW3 sequence no. 5 | SEQ ID NO: 84 | RFTASRDNAKNTLYLQMNSLKSEDTARYYCAR |
| GLEW FW3 sequence no. 6 | SEQ ID NO: 85 | RFTISRDNAKNTLYLQMDDLQSEDTAMYYCGR |

[2176] and in which:
[2177] v) FR4 is an amino acid sequence that has at least 80% amino acid identity with at least one of the following amino acid sequences:

TABLE A-19
Representative FW4 sequences for
Nanobodies of the GLEW-group.

| | | |
|---|---|---|
| GLEW FW4 sequence no. 1 | SEQ ID NO: 86 | GSQGTQVTVSS |
| GLEW FW4 sequence no. 2 | SEQ ID NO: 87 | LRGGTQVTVSS |
| GLEW FW4 sequence no. 3 | SEQ ID NO: 88 | RGQGTLVTVSS |
| GLEW FW4 sequence no. 4 | SEQ ID NO: 89 | RSRGIQVTVSS |
| GLEW FW4 sequence no. 5 | SEQ ID NO: 90 | WGKGTQVTVSS |
| GLEW FW4 sequence no. 6 | SEQ ID NO: 91 | WGQGTQVTVSS |

[2178] and in which:
[2179] vi) CDR1, CDR2 and CDR3 are as defined herein, and are preferably as defined according to one of the preferred aspects herein, and are more preferably as defined according to one of the more preferred aspects herein.

[2180] In the above Nanobodies, one or more of the further Hallmark residues are preferably as described herein (for example, when they are V_{HH} sequences or partially humanized Nanobodies).

[2181] With regard to framework 1, it will again be clear to the skilled person that, for determining the degree of amino acid identity, the amino acid residues on positions 1 to 4 and 27 to 30 are preferably disregarded.

[2182] In view of this, a Nanobody of the GLEW class may be an amino acid sequence that is comprised of four framework regions/sequences interrupted by three complementarity determining regions/sequences, in which:
[2183] i) preferably, when the Nanobody of the GLEW-class is a non-humanized Nanobody, the amino acid residue in position 108 is Q;
   [2184] and in which:
[2185] ii) FR1 is an amino acid sequence that, on positions 5 to 26 of the Kabat numbering, has at least 80% amino acid identity with at least one of the following amino acid sequences:

TABLE A-20
Representative FW1 sequences
(amino acid residues 5 to 26)
for Nanobodies of the KERE-group.

| | | |
|---|---|---|
| GLEW FW1 | SEQ ID NO: 69 | VESGGGLVQPGGSLRLSCAASG |
| sequence no. 6 | | |
| GLEW FW1 | SEQ ID NO: 70 | EESGGGLAQPGGSLRLSCVASG |
| sequence no. 7 | | |
| GLEW FW1 | SEQ ID NO: 71 | VESGGGLALPGGSLTLSCVFSG |
| sequence no. 8 | | |

[2186] and in which:
[2187] iii) FR2, FR3 and FR4 are as mentioned herein for FR2, FR3 and FR4 of Nanobodies of the GLEW-class;
   [2188] and in which:
[2189] iv) CDR1, CDR2 and CDR3 are as defined herein, and are preferably as defined according to one of the preferred aspects herein, and are more preferably as defined according to one of the more preferred aspects herein.

[2190] The above Nanobodies may for example be V_{HH} sequences or may be humanized

[2191] Nanobodies. When the above Nanobody sequences are V_{HH} sequences, they may be suitably humanized, as further described herein. When the Nanobodies are partially humanized Nanobodies, they may optionally be further suitably humanized, again as described herein. In the above Nanobodies, one or more of the further Hallmark residues are preferably as described herein (for example, when they are V_{HH} sequences or partially humanized Nanobodies).

[2192] A Nanobody of the P, R, S 103 class may be an amino acid sequence that is comprised of four framework regions/sequences interrupted by three complementarity determining regions/sequences, in which
[2193] i) the amino acid residue at position 103 according to the Kabat numbering is different from W;
   [2194] and in which:
[2195] ii) preferably the amino acid residue at position 103 according to the Kabat numbering is P, R or S, and more preferably R;
   [2196] and in which:
[2197] iii) FR1 is an amino acid sequence that has at least 80% amino acid identity with at least one of the following amino acid sequences:

TABLE A-21
Representative FW1 sequences for Nanobodies of the P, R, S 103-group.

| | | |
|---|---|---|
| P, R, S 103 FW1 sequence no. 1 | SEQ ID NO: 92 | AVQLVESGGGLVQAGGSLRLSCAASGRTFS |
| P, R, S 103 FW1 sequence no. 2 | SEQ ID NO: 93 | QVQLQESGGGMVQPGGSLRLSCAASGFDFG |
| P, R, S 103 FW1 sequence no. 3 | SEQ ID NO: 94 | EVHLVESGGGLVRPGGSLRLSCAAFGFIFK |
| P, R, S 103 FW1 sequence no. 4 | SEQ ID NO: 95 | QVQLAESGGGLVQPGGSLKLSCAASRTIVS |
| P, R, S 103 FW1 sequence no. 5 | SEQ ID NO: 96 | QEHLVESGGGLVDIGGSLRLSCAASERIFS |
| P, R, S 103 FW1 sequence no. 6 | SEQ ID NO: 97 | QVKLEESGGGLAQPGGSLRLSCVASGFTFS |
| P, R, S 103 FW1 sequence no. 7 | SEQ ID NO: 98 | EVQLVESGGGLVQPGGSLRLSCVCVSSGCT |
| P, R, S 103 FW1 sequence no. 8 | SEQ ID NO: 99 | EVQLVESGGGLALPGGSLTLSCVFSGSTFS |

[2198] and in which
[2199] iv) FR2 is an amino acid sequence that has at least 80% amino acid identity with at least one of the following amino acid sequences:

TABLE A-22

Representative FW2 sequences for
Nanobodies of the P, R, S 103-group.

| | | |
|---|---|---|
| P, R, S 103 FW2 sequence no. 1 | SEQ ID NO: 102 | WFRQAPGKEREFVA |
| P, R, S 103 FW2 sequence no. 2 | SEQ ID NO: 103 | WVRQAPGKVLEWVS |
| P, R, S 103 FW2 sequence no. 3 | SEQ ID NO: 104 | WVRRPPGKGLEWVS |
| P, R, S 103 FW2 sequence no. 4 | SEQ ID NO: 105 | WIRQAPGKEREGVS |
| P, R, S 103 FW2 sequence no. 5 | SEQ ID NO: 106 | WVRQYPGKEPEWVS |
| P, R, S 103 FW2 sequence no. 6 | SEQ ID NO: 107 | WFRQPPGKEHEFVA |
| P, R, S 103 FW2 sequence no. 7 | SEQ ID NO: 108 | WYRQAPGKRTELVA |
| P, R, S 103 FW2 sequence no. 8 | SEQ ID NO: 109 | WLRQAPGQGLEWVS |
| P, R, S 103 FW2 sequence no. 9 | SEQ ID NO: 110 | WLRQTPGKGLEWVG |
| P, R, S 103 FW2 sequence no. 10 | SEQ ID NO: 111 | WVRQAPGKAEEFVS |

[2200] and in which:
[2201] v) FR3 is an amino acid sequence that has at least 80% amino acid identity with at least one of the following amino acid sequences:

TABLE A-23
Representative FW3 sequences for Nanobodies of the P, R, S 103-group.

| | | |
|---|---|---|
| P, R, S 103 FW3 sequence no. 1 | SEQ ID NO: 112 | RFTISRDNAKNTVYLQMNSLKPEDTAVYYCAA |
| P, R, S 103 FW3 sequence no. 2 | SEQ ID NO: 113 | RFTISRDNARNTLYLQMDSLIPEDTALYYCAR |
| P, R, S 103 FW3 sequence no. 3 | SEQ ID NO: 114 | RFTISRDNAKNEMYLQMNNLKTEDTGVYWCGA |
| P, R, S 103 FW3 sequence no. 4 | SEQ ID NO: 115 | RFTISSDSNRNMIYLQMNNLKPEDTAVYYCAA |
| P, R, S 103 FW3 sequence no. 5 | SEQ ID NO: 116 | RFTISRDNAKNMLYLHLNNLKSEDTAVYYCRR |
| P, R, S 103 FW3 sequence no. 6 | SEQ ID NO: 117 | RFTISRDNAKKTVYLRLNSLNPEDTAVYSCNL |
| P, R, S 103 FW3 sequence no. 7 | SEQ ID NO: 118 | RFKISRDNAKKTLYLQMNSLGPEDTAMYYCQR |
| P, R, S 103 FW3 sequence no. 8 | SEQ ID NO: 119 | RFTVSRDNGKNTAYLRMNSLKPEDTADYYCAV |

[2202] and in which:
[2203] vi) FR4 is an amino acid sequence that has at least 80% amino acid identity with at least one of the following amino acid sequences:

TABLE A-24
Representative FW4 sequences for
Nanobodies of the P, R, S 103-group.

| | | |
|---|---|---|
| P, R, S 103 FW4 | SEQ ID NO: 120 | RGQGTQVTVSS |
| sequence no. 1 | | |
| P, R, S 103 FW4 | SEQ ID NO: 121 | LRGGTQVTVSS |
| sequence no. 2 | | |
| P, R, S 103 FW4 | SEQ ID NO: 122 | GNKGTLVTVSS |
| sequence no. 3 | | |
| P, R, S 103 FW4 | SEQ ID NO: 123 | SSPGTQVTVSS |
| sequence no. 4 | | |
| P, R, S 103 FW4 | SEQ ID NO: 124 | SSQGTLVTVSS |
| sequence no. 5 | | |
| P, R, S 103 FW4 | SEQ ID NO: 125 | RSRGIQVTVSS |
| sequence no. 6 | | |

[2204] and in which:
[2205] vii) CDR1, CDR2 and CDR3 are as defined herein, and are preferably as defined according to one of the preferred aspects herein, and are more preferably as defined according to one of the more preferred aspects herein.

[2206] In the above Nanobodies, one or more of the further Hallmark residues are preferably as described herein (for example, when they are V_{HH} sequences or partially humanized Nanobodies).

[2207] With regard to framework 1, it will again be clear to the skilled person that, for determining the degree of amino acid identity, the amino acid residues on positions 1 to 4 and 27 to 30 are preferably disregarded.

[2208] In view of this, a Nanobody of the P,R,S 103 class may be an amino acid sequence that is comprised of four framework regions/sequences interrupted by three complementarity determining regions/sequences, in which:
[2209] i) the amino acid residue at position 103 according to the Kabat numbering is different from W;
   [2210] and in which:
[2211] ii) preferably the amino acid residue at position 103 according to the Kabat numbering is P, R or S, and more preferably R;
   [2212] and in which:
[2213] iii) FR1 is an amino acid sequence that, on positions 5 to 26 of the Kabat numbering, has at least 80% amino acid identity with at least one of the following amino acid sequences:

TABLE A-25
Representative FW1 sequences
(amino acid residues 5 to 26) for
Nanobodies of the P, R, S 103-group.

| | | |
|---|---|---|
| P, R, S 103 FW1 | SEQ ID NO: 100 | VESGGGLVQAGG |
| sequence no. 9 | | SLRLSCAASG |
| P, R, S 103 FW1 | SEQ ID NO: 101 | AESGGGLVQPGG |
| sequence no. 10 | | SLKLSCAASR |

[2214] and in which:
[2215] iv) FR2, FR3 and FR4 are as mentioned herein for FR2, FR3 and FR4 of Nanobodies of the P,R,S 103 class;
   [2216] and in which:
[2217] v) CDR1, CDR2 and CDR3 are as defined herein, and are preferably as defined according to one of the preferred aspects herein, and are more preferably as defined according to one of the more preferred aspects herein.

[2218] The above Nanobodies may for example be V_{HH} sequences or may be humanized Nanobodies. When the above Nanobody sequences are V_{HH} sequences, they may be suitably humanized, as further described herein. When the Nanobodies are partially humanized Nanobodies, they may optionally be further suitably humanized, again as described herein.

[2219] In the above Nanobodies, one or more of the further Hallmark residues are preferably as described herein (for example, when they are V_{HH} sequences or partially humanized Nanobodies).

[2220] Preferably, the CDR sequences and FR sequences in the (single) domain antibodies and/or Nanobodies of the invention are such that the Nanobodies of the invention (and polypeptides of the invention comprising the same):
[2221] bind to heterodimeric cytokines and/or their receptors with a dissociation constant (K_{D}) of 10⁻⁵ to 10⁻¹² moles/liter or less, and preferably 10^{—7} to 10⁻¹² moles/liter or less and more preferably 10⁻⁸ to 10^{—12} moles/liter (i.e. with an association constant (K_{A}) of 10⁵ to 10¹² liter/moles or more, and preferably 10⁷ to 10¹² liter/moles or more and more preferably 10⁸ to 10¹² liter/moles);
[2222] and/or such that they:
[2223] bind to heterodimeric cytokines and/or their receptors with a kₒₙ-rate of between 10² M⁻¹s⁻¹ to about 10⁷ M⁻¹s⁻¹, preferably between 10³ M⁻¹s⁻¹ and 10⁷ M⁻¹s⁻¹, more preferably between 10⁴ M⁻¹s⁻¹ and 10⁷ M⁻¹s⁻¹, such as between 10⁵ M⁻¹s⁻¹ and 10⁷ M⁻¹s⁻¹;
[2224] and/or such that they:
[2225] bind to heterodimeric cytokines and/or their receptors with a k_{off} rate between 1 s⁻¹ (t_{1/2}=0.69 s) and 10⁻⁶ s⁻¹ (providing a near irreversible complex with a t_{1/2} of multiple days), preferably between 10⁻² and 10⁻⁶ s⁻¹, more preferably between 10⁻³ and 10⁻⁶ s⁻¹, such as between 10⁻⁴ s⁻¹ and 10⁻⁶ s⁻¹.

[2226] Preferably, CDR sequences and FR sequences present in the Nanobodies of the invention are such that the Nanobodies of the invention will bind to heterodimeric cytokines and/or their receptors with an affinity less than 500 nM, preferably less than 200 nM, more preferably less than 10 nM, such as less than 500 pM.

[2227] According to one non-limiting aspect of the invention, a Nanobody may be as defined herein, but with the proviso that it has at least “one amino acid difference” (as defined herein) in at least one of the framework regions compared to the corresponding framework region of a naturally occurring human V_{H} domain, and in particular compared to the corresponding framework region of DP-47. More specifically, according to one non-limiting aspect of the invention, a Nanobody may be as defined herein, but with the proviso that it has at least “one amino acid difference” (as defined herein) at at least one of the Hallmark residues (including those at positions 108, 103 and/or 45) compared to the corresponding framework region of a naturally occurring human V_{H} domain, and in particular compared to the corresponding framework region of DP-47. Usually, a Nanobody will have at least one such amino acid difference with a naturally occurring V_{H} domain in at least one of FR2 and/or FR4, and in particular at at least one of the Hallmark residues in FR2 and/or FR4 (again, including those at positions 108, 103 and/or 45).

[2228] Also, a humanized Nanobody of the invention may be as defined herein, but with the proviso that it has at least “one amino acid difference” (as defined herein) in at least one of the framework regions compared to the corresponding framework region of a naturally occurring V_{HH} domain. More specifically, according to one non-limiting aspect of the invention, a humanized Nanobody may be as defined herein, but with the proviso that it has at least “one amino acid difference” (as defined herein) at at least one of the Hallmark residues (including those at positions 108, 103 and/or 45) compared to the corresponding framework region of a naturally occurring V_{HH} domain. Usually, a humanized Nanobody will have at least one such amino acid difference with a naturally occurring V_{HH} domain in at least one of FR2 and/or FR4, and in particular at at least one of the Hallmark residues in FR2 and/or FR4 (again, including those at positions 108, 103 and/or 45).

[2229] As will be clear from the disclosure herein, it is also within the scope of the invention to use natural or synthetic analogs, mutants, variants, alleles, homologs and orthologs (herein collectively referred to as “analogs”) of the Nanobodies of the invention as defined herein. Thus, according to one aspect of the invention, the term “Nanobody of the invention” in its broadest sense also covers such analogs.

[2230] Generally, in such analogs, one or more amino acid residues may have been replaced, deleted and/or added, compared to the Nanobodies of the invention as defined herein. Such substitutions, insertions or deletions may be made in one or more of the framework regions and/or in one or more of the CDR's. When such substitutions, insertions or deletions are made in one or more of the framework regions, they may be made at one or more of the Hallmark residues and/or at one or more of the other positions in the framework residues, although substitutions, insertions or deletions at the Hallmark residues are generally less preferred (unless these are suitable humanizing substitutions as described herein).

[2231] By means of non-limiting examples, a substitution may for example be a conservative substitution (as described herein) and/or an amino acid residue may be replaced by another amino acid residue that naturally occurs at the same position in another V_{HH} domain (see Tables A-5 to A-8 for some non-limiting examples of such substitutions), although the invention is generally not limited thereto. Thus, any one or more substitutions, deletions or insertions, or any combination thereof, that either improve the properties of the Nanobody of the invention or that at least do not detract too much from the desired properties or from the balance or combination of desired properties of the Nanobody of the invention (i.e. to the extent that the Nanobody is no longer suited for its intended use) are included within the scope of the invention. A skilled person will generally be able to determine and select suitable substitutions, deletions or insertions, or suitable combinations of thereof, based on the disclosure herein and optionally after a limited degree of routine experimentation, which may for example involve introducing a limited number of possible substitutions and determining their influence on the properties of the Nanobodies thus obtained.

[2232] For example, and depending on the host organism used to express the Nanobody or polypeptide of the invention, such deletions and/or substitutions may be designed in such a way that one or more sites for post-translational modification (such as one or more glycosylation sites) are removed, as will be within the ability of the person skilled in the art. Alternatively, substitutions or insertions may be designed so as to introduce one or more sites for attachment of functional groups (as described herein), for example to allow site-specific pegylation (again as described herein).

[2233] As can be seen from the data on the V_{HH} entropy and V_{HH} variability given in Tables A-5 to A-8 above, some amino acid residues in the framework regions are more conserved than others. Generally, although the invention in its broadest sense is not limited thereto, any substitutions, deletions or insertions are preferably made at positions that are less conserved. Also, generally, amino acid substitutions are preferred over amino acid deletions or insertions.

[2234] The analogs are preferably such that they can bind to heterodimeric cytokines and/or their receptors with an affinity (suitably measured and/or expressed as a K_{D}-value (actual or apparent), a K_{A}-value (actual or apparent), a kₒₙ-rate and/or a k_{off}-rate, or alternatively as an IC₅₀ value, as further described herein) that is as defined herein for the Nanobodies of the invention.

[2235] The analogs are preferably also such that they retain the favourable properties the Nanobodies, as described herein.

[2236] Also, according to one preferred aspect, the analogs have a degree of sequence identity of at least 70%, preferably at least 80%, more preferably at least 90%, such as at least 95% or 99% or more; and/or preferably have at most 20, preferably at most 10, even more preferably at most 5, such as 4, 3, 2 or only 1 amino acid difference (as defined herein), with one of the p19+ sequences, p19− sequences, p40− sequences, p40+ sequences, p35 sequences, IL-27 sequences, IL-12Rb1 sequences, IL-12Rb2 sequences or IL-23R sequences, respectively,that are mentioned in Table A-2.

[2237] Also, the framework sequences and CDR's of the analogs are preferably such that they are in accordance with the preferred aspects defined herein. More generally, as described herein, the analogs will have (a) a Q at position 108; and/or (b) a charged amino acid or a cysteine residue at position 45 and preferably an E at position 44, and more preferably E at position 44 and R at position 45; and/or (c) P, R or S at position 103.

[2238] One preferred class of analogs of the Nanobodies of the invention comprise Nanobodies that have been humanized (i.e. compared to the sequence of a naturally occurring Nanobody of the invention). As mentioned in the background art cited herein, such humanization generally involves replacing one or more amino acid residues in the sequence of a naturally occurring V_{HH} with the amino acid residues that occur at the same position in a human V_{H} domain, such as a human V_{H}3 domain. Examples of possible humanizing substitutions or combinations of humanizing substitutions will be clear to the skilled person, for example from the Tables herein, from the possible humanizing substitutions mentioned in the background art cited herein, and/or from a comparision between the sequence of a Nanobody and the sequence of a naturally occurring human V_{H} domain.

[2239] The humanizing substitutions should be chosen such that the resulting humanized Nanobodies still retain the favourable properties of Nanobodies as defined herein, and more preferably such that they are as described for analogs in the preceding paragraphs. A skilled person will generally be able to determine and select suitable humanizing substitutions or suitable combinations of humanizing substitutions, based on the disclosure herein and optionally after a limited degree of routine experimentation, which may for example involve introducing a limited number of possible humanizing substitutions and determining their influence on the properties of the Nanobodies thus obtained.

[2240] Generally, as a result of humanization, the Nanobodies of the invention may become more “human-like”, while still retaining the favorable properties of the Nanobodies of the invention as described herein. As a result, such humanized Nanobodies may have several advantages, such as a reduced immunogenicity, compared to the corresponding naturally occurring V_{HH} domains. Again, based on the disclosure herein and optionally after a limited degree of routine experimentation, the skilled person will be able to select humanizing substitutions or suitable combinations of humanizing substitutions which optimize or achieve a desired or suitable balance between the favourable properties provided by the humanizing substitutions on the one hand and the favourable properties of naturally occurring V_{HH} domains on the other hand.

[2241] The Nanobodies of the invention may be suitably humanized at any framework residue(s), such as at one or more Hallmark residues (as defined herein) or at one or more other framework residues (i.e. non-Hallmark residues) or any suitable combination thereof. One preferred humanizing substitution for Nanobodies of the “P,R,S-103 group” or the “KERE group” is Q108 into L108. Nanobodies of the “GLEW class” may also be humanized by a Q108 into L108 substitution, provided at least one of the other Hallmark residues contains a camelid (camelizing) substitution (as defined herein). For example, as mentioned above, one particularly preferred class of humanized Nanobodies has GLEW or a GLEW-like sequence at positions 44-47; P, R or S (and in particular R) at position 103, and an L at position 108.

[2242] The humanized and other analogs, and nucleic acid sequences encoding the same, can be provided in any manner known per se. For example, the analogs can be obtained by providing a nucleic acid that encodes a naturally occurring V_{HH} domain, changing the codons for the one or more amino acid residues that are to be substituted into the codons for the corresponding desired amino acid residues (e.g. by site-directed mutagenesis or by PCR using suitable mismatch primers), expressing the nucleic acid/nucleotide sequence thus obtained in a suitable host or expression system; and optionally isolating and/or purifying the analog thus obtained to provide said analog in essentially isolated form (e.g. as further described herein). This can generally be performed using methods and techniques known per se, which will be clear to the skilled person, for example from the handbooks and references cited herein, the background art cited herein and/or from the further description herein. Alternatively, a nucleic acid encoding the desired analog can be synthesized in a manner known per se (for example using an automated apparatus for synthesizing nucleic acid sequences with a predefined amino acid sequence) and can then be expressed as described herein. Yet another technique may involve combining one or more naturally occurring and/or synthetic nucleic acid sequences each encoding a part of the desired analog, and then expressing the combined nucleic acid sequence as described herein. Also, the analogs can be provided using chemical synthesis of the pertinent amino acid sequence using techniques for peptide synthesis known per se, such as those mentioned herein.

[2243] In this respect, it will be also be clear to the skilled person that the Nanobodies of the invention (including their analogs) can be designed and/or prepared starting from human V_{H} sequences (i.e. amino acid sequences or the corresponding nucleotide sequences), such as for example from human V_{H}3 sequences such as DP-47, DP-51 or DP-29, i.e. by introducing one or more camelizing substitutions (i.e. changing one or more amino acid residues in the amino acid sequence of said human V_{H} domain into the amino acid residues that occur at the corresponding position in a V_{HH} domain), so as to provide the sequence of a Nanobody of the invention and/or so as to confer the favourable properties of a Nanobody to the sequence thus obtained. Again, this can generally be performed using the various methods and techniques referred to in the previous paragraph, using an amino acid sequence and/or nucleotide sequence for a human V_{H} domain as a starting point.

[2244] Some preferred, but non-limiting camelizing substitutions can be derived from Tables A-5-A-8. It will also be clear that camelizing substitutions at one or more of the Hallmark residues will generally have a greater influence on the desired properties than substitutions at one or more of the other amino acid positions, although both and any suitable combination thereof are included within the scope of the invention. For example, it is possible to introduce one or more camelizing substitutions that already confer at least some the desired properties, and then to introduce further camelizing substitutions that either further improve said properties and/or confer additional favourable properties. Again, the skilled person will generally be able to determine and select suitable camelizing substitutions or suitable combinations of camelizing substitutions, based on the disclosure herein and optionally after a limited degree of routine experimentation, which may for example involve introducing a limited number of possible camelizing substitutions and determining whether the favourable properties of Nanobodies are obtained or improved (i.e. compared to the original V_{H} domain).

[2245] Generally, however, such camelizing substitutions are preferably such that the resulting an amino acid sequence at least contains (a) a Q at position 108; and/or (b) a charged amino acid or a cysteine residue at position 45 and preferably also an E at position 44, and more preferably E at position 44 and R at position 45; and/or (c) P, R or S at position 103; and optionally one or more further camelizing substitutions. More preferably, the camelizing substitutions are such that they result in a Nanobody of the invention and/or in an analog thereof (as defined herein), such as in a humanized analog and/or preferably in an analog that is as defined in the preceding paragraphs.

[2246] As will also be clear from the disclosure herein, it is also within the scope of the invention to use parts or fragments, or combinations of two or more parts or fragments, of the Nanobodies of the invention as defined herein, and in particular parts or fragments of the p19+, p19−, p40+, p40−, anti p35, anti-IL-27, anti IL-12Rb1, anti IL-12Rb2 and anti IL-23R Nanobodies, respectively, as further described herein and/or as listed in Table A-2; or of humanized variants thereof. Thus, according to one aspect of the invention, the term “Nanobody of the invention” in its broadest sense also covers such parts or fragments.

[2247] Generally, such parts or fragments of the Nanobodies of the invention (including analogs thereof) have amino acid sequences in which, compared to the amino acid sequence of the corresponding full length Nanobody of the invention (or analog thereof), one or more of the amino acid residues at the N-terminal end, one or more amino acid residues at the C-terminal end, one or more contiguous internal amino acid residues, or any combination thereof, have been deleted and/or removed.

[2248] The parts or fragments are preferably such that they can bind to heterodimeric cytokines and/or their receptors with an affinity (suitably measured and/or expressed as a K_{D}-value (actual or apparent), a K_{A}-value (actual or apparent), a kₒₙ-rate and/or a k_{off}-rate, or alternatively as an IC₅₀ value, as further described herein) that is as defined herein for the Nanobodies of the invention.

[2249] Any part or fragment is preferably such that it comprises at least 10 contiguous amino acid residues, preferably at least 20 contiguous amino acid residues, more preferably at least 30 contiguous amino acid residues, such as at least 40 contiguous amino acid residues, of the amino acid sequence of the corresponding full length Nanobody of the invention.

[2250] Also, any part or fragment is such preferably that it comprises at least one of CDR1, CDR2 and/or CDR3 or at least part thereof (and in particular at least CDR3 or at least part thereof). More preferably, any part or fragment is such that it comprises at least one of the CDR's (and preferably at least CDR3 or part thereof) and at least one other CDR (i.e. CDR1 or CDR2) or at least part thereof, preferably connected by suitable framework sequence(s) or at least part thereof. More preferably, any part or fragment is such that it comprises at least one of the CDR's (and preferably at least CDR3 or part thereof) and at least part of the two remaining CDR's, again preferably connected by suitable framework sequence(s) or at least part thereof.

[2251] According to another particularly preferred, but non-limiting aspect, such a part or fragment comprises at least CDR3, such as FR3, CDR3 and FR4 of the corresponding full length Nanobody of the invention, i.e. as for example described in the International application WO 03/050531 (Lasters et al.).

[2252] As already mentioned above, it is also possible to combine two or more of such parts or fragments (i.e. from the same or different Nanobodies of the invention), i.e. to provide an analog (as defined herein) and/or to provide further parts or fragments (as defined herein) of a Nanobody of the invention. It is for example also possible to combine one or more parts or fragments of a Nanobody of the invention with one or more parts or fragments of a human V_{H} domain.

[2253] According to one preferred aspect, the parts or fragments have a degree of sequence identity of at least 50%, preferably at least 60%, more preferably at least 70%, even more preferably at least 80%, such as at least 90%, 95% or 99% or more with one of the p19+, p19−, p40+, p40−, anti p35, anti-IL-27, anti IL-12Rb1, anti IL-12Rb2 and anti IL-23R Nanobodies, respectively, as further described herein and/or as listed in Table A-2; and/or with of humanized variants thereof.

[2254] The parts and fragments, and nucleic acid sequences encoding the same, can be provided and optionally combined in any manner known per se. For example, such parts or fragments can be obtained by inserting a stop codon in a nucleic acid that encodes a full-sized Nanobody of the invention, and then expressing the nucleic acid thus obtained in a manner known per se (e.g. as described herein). Alternatively, nucleic acids encoding such parts or fragments can be obtained by suitably restricting a nucleic acid that encodes a full-sized Nanobody of the invention or by synthesizing such a nucleic acid in a manner known per se. Parts or fragments may also be provided using techniques for peptide synthesis known per se.

[2255] The invention in its broadest sense also comprises derivatives of the Nanobodies of the invention. Such derivatives can generally be obtained by modification, and in particular by chemical and/or biological (e.g enzymatical) modification, of the Nanobodies of the invention and/or of one or more of the amino acid residues that form the Nanobodies of the invention.

[2256] Examples of such modifications, as well as examples of amino acid residues within the Nanobody sequence that can be modified in such a manner (i.e. either on the protein backbone but preferably on a side chain), methods and techniques that can be used to introduce such modifications and the potential uses and advantages of such modifications will be clear to the skilled person.

[2257] For example, such a modification may involve the introduction (e.g. by covalent linking or in an other suitable manner) of one or more functional groups, residues or moieties into or onto the Nanobody of the invention, and in particular of one or more functional groups, residues or moieties that confer one or more desired properties or functionalities to the Nanobody of the invention. Example of such functional groups will be clear to the skilled person.

[2258] For example, such modification may comprise the introduction (e.g. by covalent binding or in any other suitable manner) of one or more functional groups that increase the half-life, the solubility and/or the absorption of the Nanobody of the invention, that reduce the immunogenicity and/or the toxicity of the Nanobody of the invention, that eliminate or attenuate any undesirable side effects of the Nanobody of the invention, and/or that confer other advantageous properties to and/or reduce the undesired properties of the Nanobodies and/or polypeptides of the invention; or any combination of two or more of the foregoing. Examples of such functional groups and of techniques for introducing them will be clear to the skilled person, and can generally comprise all functional groups and techniques mentioned in the general background art cited hereinabove as well as the functional groups and techniques known per se for the modification of pharmaceutical proteins, and in particular for the modification of antibodies or antibody fragments (including ScFv's and single domain antibodies), for which reference is for example made to Remington's Pharmaceutical Sciences, 16th ed., Mack Publishing Co., Easton, Pa. (1980). Such functional groups may for example be linked directly (for example covalently) to a Nanobody of the invention, or optionally via a suitable linker or spacer, as will again be clear to the skilled person.

[2259] One of the most widely used techniques for increasing the half-life and/or reducing the immunogenicity of pharmaceutical proteins comprises attachment of a suitable pharmacologically acceptable polymer, such as poly(ethyleneglycol) (PEG) or derivatives thereof (such as methoxypoly(ethyleneglycol) or mPEG). Generally, any suitable form of pegylation can be used, such as the pegylation used in the art for antibodies and antibody fragments (including but not limited to (single) domain antibodies and ScFv's); reference is made to for example Chapman, Nat. Biotechnol., 54, 531-545 (2002); by Veronese and Harris, Adv. Drug Deliv. Rev. 54, 453-456 (2003), by Harris and Chess, Nat. Rev. Drug. Discov., 2, (2003) and in WO 04/060965. Various reagents for pegylation of proteins are also commercially available, for example from Nektar Therapeutics, USA.

[2260] Preferably, site-directed pegylation is used, in particular via a cysteine-residue (see for example Yang et al., Protein Engineering, 16, 10, 761-770 (2003). For example, for this purpose, PEG may be attached to a cysteine residue that naturally occurs in a Nanobody of the invention, a Nanobody of the invention may be modified so as to suitably introduce one or more cysteine residues for attachment of PEG, or an amino acid sequence comprising one or more cysteine residues for attachment of PEG may be fused to the N- and/or C-terminus of a Nanobody of the invention, all using techniques of protein engineering known per se to the skilled person.

[2261] Preferably, for the Nanobodies and proteins of the invention, a PEG is used with a molecular weight of more than 5000, such as more than 10,000 and less than 200,000, such as less than 100,000; for example in the range of 20,000-80,000.

[2262] Another, usually less preferred modification comprises N-linked or O-linked glycosylation, usually as part of co-translational and/or post-translational modification, depending on the host cell used for expressing the Nanobody or polypeptide of the invention.

[2263] Yet another modification may comprise the introduction of one or more detectable labels or other signal-generating groups or moieties, depending on the intended use of the labelled Nanobody. Suitable labels and techniques for attaching, using and detecting them will be clear to the skilled person, and for example include, but are not limited to, fluorescent labels (such as fluorescein, isothiocyanate, rhodamine, phycoerythrin, phycocyanin, allophycocyanin, o-phthaldehyde, and fluorescamine and fluorescent metals such as ¹⁵²Eu or others metals from the lanthanide series), phosphorescent labels, chemiluminescent labels or bioluminescent labels (such as luminal, isoluminol, theromatic acridinium ester, imidazole, acridinium salts, oxalate ester, dioxetane or GFP and its analogs), radio-isotopes (such as ³H, ¹²⁵I, ³²P, ³⁵S, ¹⁴C, ⁵¹Cr, ³⁶Cl, ⁵⁷Co, ⁵⁸Co, ⁵⁹Fe, and ⁷⁵Se), metals, metal chelates or metallic cations (for example metallic cations such as ^{99m}Tc, ¹²³I, ¹¹¹In, ¹³¹I, ⁹⁷Ru, ⁶⁷Cu, ⁶⁷Ga, and ⁶⁸Ga or other metals or metallic cations that are particularly suited for use in in vivo, in vitro or in situ diagnosis and imaging, such as (¹⁵⁷Gd, ⁵⁵Mn, ¹⁶²Dy, ⁵²Cr, and ⁵⁶Fe), as well as chromophores and enzymes (such as malate dehydrogenase, staphylococcal nuclease, delta-V-steroid isomerase, yeast alcohol dehydrogenase, alpha-glycerophosphate dehydrogenase, triose phosphate isomerase, biotinavidin peroxidase, horseradish peroxidase, alkaline phosphatase, asparaginase, glucose oxidase, beta-galactosidase, ribonuclease, urease, catalase, glucose-VI-phosphate dehydrogenase, glucoamylase and acetylcholine esterase). Other suitable labels will be clear to the skilled person, and for example include moieties that can be detected using NMR or ESR spectroscopy.

[2264] Such labelled Nanobodies and polypeptides of the invention may for example be used for in vitro, in vivo or in situ assays (including immunoassays known per se such as ELISA, RIA, EIA and other “sandwich assays”, etc.) as well as in vivo diagnostic and imaging purposes, depending on the choice of the specific label.

[2265] As will be clear to the skilled person, another modification may involve the introduction of a chelating group, for example to chelate one of the metals or metallic cations referred to above. Suitable chelating groups for example include, without limitation, diethylenetriaminepentaacetic acid (DTPA) or ethylenediaminetetraacetic acid (EDTA).

[2266] Yet another modification may comprise the introduction of a functional group that is one part of a specific binding pair, such as the biotin-(strept)avidin binding pair. Such a functional group may be used to link the Nanobody of the invention to another protein, polypeptide or chemical compound that is bound to the other half of the binding pair, i.e. through formation of the binding pair. For example, a Nanobody of the invention may be conjugated to biotin, and linked to another protein, polypeptide, compound or carrier conjugated to avidin or streptavidin. For example, such a conjugated Nanobody may be used as a reporter, for example in a diagnostic system where a detectable signal-producing agent is conjugated to avidin or streptavidin. Such binding pairs may for example also be used to bind the Nanobody of the invention to a carrier, including carriers suitable for pharmaceutical purposes. One non-limiting example are the liposomal formulations described by Cao and Suresh, Journal of Drug Targetting, 8, 4, 257 (2000). Such binding pairs may also be used to link a therapeutically active agent to the Nanobody of the invention.

[2267] For some applications, in particular for those applications in which it is intended to kill a cell that expresses the target against which the Nanobodies of the invention are directed (e.g. in the treatment of cancer), or to reduce or slow the growth and/or proliferation such a cell, the Nanobodies of the invention may also be linked to a toxin or to a toxic residue or moiety. Examples of toxic moieties, compounds or residues which can be linked to a Nanobody of the invention to provide—for example—a cytotoxic compound will be clear to the skilled person and can for example be found in the prior art cited above and/or in the further description herein. One example is the so-called ADEPT™ technology described in WO 03/055527.

[2268] Other potential chemical and enzymatical modifications will be clear to the skilled person. Such modifications may also be introduced for research purposes (e.g. to study function-activity relationships). Reference is for example made to Lundblad and Bradshaw, Biotechnol. Appl. Biochem., 26, 143-151 (1997).

[2269] Preferably, the derivatives are such that they bind to heterodimeric cytokines and/or their receptors with an affinity (suitably measured and/or expressed as a K_{D}-value (actual or apparent), a K_{A}-value (actual or apparent), a kₒₙ-rate and/or a k_{off}-rate, or alternatively as an IC₅₀ value, as further described herein) that is as defined herein for the Nanobodies of the invention.

[2270] As mentioned above, the invention also relates to proteins or polypeptides that essentially consist of or comprise at least one Nanobody of the invention. By “essentially consist of” is meant that the amino acid sequence of the polypeptide of the invention either is exactly the same as the amino acid sequence of a Nanobody of the invention or corresponds to the amino acid sequence of a Nanobody of the invention which has a limited number of amino acid residues, such as 1-20 amino acid residues, for example 1-10 amino acid residues and preferably 1-6 amino acid residues, such as 1, 2, 3, 4, 5 or 6 amino acid residues, added at the amino terminal end, at the carboxy terminal end, or at both the amino terminal end and the carboxy terminal end of the amino acid sequence of the Nanobody.

[2271] Said amino acid residues may or may not change, alter or otherwise influence the (biological) properties of the Nanobody and may or may not add further functionality to the Nanobody. For example, such amino acid residues:
[2272] can comprise an N-terminal Met residue, for example as result of expression in a heterologous host cell or host organism.
[2273] may form a signal sequence or leader sequence that directs secretion of the Nanobody from a host cell upon synthesis. Suitable secretory leader peptides will be clear to the skilled person, and may be as further described herein. Usually, such a leader sequence will be linked to the N-terminus of the Nanobody, although the invention in its broadest sense is not limited thereto;
[2274] may form a sequence or signal that allows the Nanobody to be directed towards and/or to penetrate or enter into specific organs, tissues, cells, or parts or compartments of cells, and/or that allows the Nanobody to penetrate or cross a biological barrier such as a cell membrane, a cell layer such as a layer of epithelial cells, a tumor including solid tumors, or the blood-brain-barrier. Examples of such amino acid sequences will be clear to the skilled person. Some non-limiting examples are the small peptide vectors (“Pep-trans vectors”) described in WO 03/026700 and in Temsamani et at, Expert Opin. Biol. Ther., 1, 773 (2001); Temsamani and Vidal, Drug Discov. Today, 9, 1012 (004) and Rousselle, J. Pharmacol. Exp. Ther., 296, 124-131 (2001), and the membrane translocator sequence described by Zhao et al., Apoptosis, 8, 631-637 (2003). C-terminal and N-terminal amino acid sequences for intracellular targeting of antibody fragments are for example described by Cardinale et al., Methods, 34, 171 (2004). Other suitable techniques for intracellular targeting involve the expression and/or use of so-called “intrabodies” comprising a Nanobody of the invention, as mentioned below;
[2275] may form a “tag”, for example an amino acid sequence or residue that allows or facilitates the purification of the Nanobody, for example using affinity techniques directed against said sequence or residue. Thereafter, said sequence or residue may be removed (e.g. by chemical or enzymatical cleavage) to provide the Nanobody sequence (for this purpose, the tag may optionally be linked to the Nanobody sequence via a cleavable linker sequence or contain a cleavable motif). Some preferred, but non-limiting examples of such residues are multiple histidine residues, glutatione residues and a myc-tag (see for example SEQ ID NO:31 of WO 06/12282).
[2276] may be one or more amino acid residues that have been functionalized and/or that can serve as a site for attachment of functional groups. Suitable amino acid residues and functional groups will be clear to the skilled person and include, but are not limited to, the amino acid residues and functional groups mentioned herein for the derivatives of the Nanobodies of the invention.

[2277] According to another aspect, a polypeptide of the invention comprises a Nanobody of the invention, which is fused at its amino terminal end, at its carboxy terminal end, or both at its amino terminal end and at its carboxy terminal end to at least one further amino acid sequence, i.e. so as to provide a fusion protein comprising said Nanobody of the invention and the one or more further amino acid sequences. Such a fusion will also be referred to herein as a “Nanobody fusion”.

[2278] The one or more further amino acid sequence may be any suitable and/or desired amino acid sequences. The further amino acid sequences may or may not change, alter or otherwise influence the (biological) properties of the Nanobody, and may or may not add further functionality to the Nanobody or the polypeptide of the invention. Preferably, the further amino acid sequence is such that it confers one or more desired properties or functionalities to the Nanobody or the polypeptide of the invention.

[2279] For example, the further amino acid sequence may also provide a second binding site, which binding site may be directed against any desired protein, polypeptide, antigen, antigenic determinant or epitope (including but not limited to the same protein, polypeptide, antigen, antigenic determinant or epitope against which the Nanobody of the invention is directed, or a different protein, polypeptide, antigen, antigenic determinant or epitope).

[2280] Example of such amino acid sequences will be clear to the skilled person, and may generally comprise all amino acid sequences that are used in peptide fusions based on conventional antibodies and fragments thereof (including but not limited to ScFv's and single domain antibodies). Reference is for example made to the review by Holliger and Hudson, Nature Biotechnology, 23, 9, 1126-1136 (2005).

[2281] For example, such an amino acid sequence may be an amino acid sequence that increases the half-life, the solubility, or the absorption, reduces the immunogenicity or the toxicity, eliminates or attenuates undesirable side effects, and/or confers other advantageous properties to and/or reduces the undesired properties of the polypeptides of the invention, compared to the Nanobody of the invention per se. Some non-limiting examples of such amino acid sequences are serum proteins, such as human serum albumin (see for example WO 00/27435) or haptenic molecules (for example haptens that are recognized by circulating antibodies, see for example WO 98/22141).

[2282] In particular, it has been described in the art that linking fragments of immunoglobulins (such as V_{H} domains) to serum albumin or to fragments thereof can be used to increase the half-life. Reference is for made to WO 00/27435 and WO 01/077137). According to the invention, the Nanobody of the invention is preferably either directly linked to serum albumin (or to a suitable fragment thereof) or via a suitable linker, and in particular via a suitable peptide linked so that the polypeptide of the invention can be expressed as a genetic fusion (protein). According to one specific aspect, the Nanobody of the invention may be linked to a fragment of serum albumin that at least comprises the domain III of serum albumin or part thereof. Reference is for example made to the U.S. provisional application 60/788,256 of Ablynx N. V. entitled “Albumin derived amino acid sequence, use thereof for increasing the half-life of therapeutic proteins and of other therapeutic proteins and entities, and constructs comprising the same” filed on Mar. 31, 2006 (see also PCT/EP2007/002817).

[2283] Alternatively, the further amino acid sequence may provide a second binding site or binding unit that is directed against a serum protein (such as, for example, human serum albumin or another serum protein such as IgG), so as to provide increased half-life in serum. Such amino acid sequences for example include the Nanobodies described below, as well as the small peptides and binding proteins described in WO 91/01743, WO 01/45746 and WO 02/076489 and the dAb's described in WO 03/002609 and WO 04/003019. Reference is also made to Harmsen et al., Vaccine, 23 (41); 4926-42, 2005, as well as to EP 0 368 684, as well as to the following the U.S. provisional applications 60/843,349 (see also PCT/EP2007/059475), 60/850,774 (see also PCT/EP2007/060849), 60/850,775 (see also PCT/EP2007/060850) by Ablynx N. V. mentioned herein and U.S. provisional application of Ablynx N. V. entitled “Peptides capable of binding to serum proteins” filed on Dec. 5, 2006 (see also WO 068280) as well as the U.S. provisional applications 61/050,385 and 61/045,690 of Ablynx N. V. both entitled “Improved peptides capable of binding to serum proteins”. Such amino acid sequences may in particular be directed against serum albumin (and more in particular human serum albumin) and/or against IgG (and more in particular human IgG). For example, such amino acid sequences may be amino acid sequences that are directed against (human) serum albumin and amino acid sequences that can bind to amino acid residues on (human) serum albumin that are not involved in binding of serum albumin to FcRn (see for example WO 06/0122787) and/or amino acid sequences that are capable of binding to amino acid residues on serum albumin that do not form part of domain III of serum albumin (see again for example WO 06/0122787); amino acid sequences that have or can provide an increased half-life (see for example the U.S. provisional application 60/843,349 by Ablynx N. V. entitled “Serum albumin binding proteins with long half-lives” filed on Sep. 8, 2006; see also PCT/EP2007/059475); amino acid sequences against human serum albumin that are cross-reactive with serum albumin from at least one species of mammal, and in particular with at least one species of primate (such as, without limitation, monkeys from the genus Macaca (such as, and in particular, cynomologus monkeys (Macaca fascicularis) and/or rhesus monkeys (Macaca mulatta)) and baboon (Papio ursinus), reference is again made to the U.S. provisional application 60/843,349 and PCT/EP2007/059475); amino acid sequences that can bind to serum albumin in a pH independent manner (see for example the U.S. provisional application 60/850,774 by Ablynx N. V. entitled “Amino acid sequences that bind to serum proteins in a manner that is essentially independent of the pH, compounds comprising the same, and uses thereof”, filed on Oct. 11, 2006, see also WO 08/043821) and/or amino acid sequences that are conditional binders (see for example the U.S. provisional application 60/850,775 by Ablynx N. V. entitled “Amino acid sequences that bind to a desired molecule in a conditional manner”, filed on Oct. 11, 2006); see also PCT/EP2007/060850).

[2284] According to another aspect, the one or more further amino acid sequences may comprise one or more parts, fragments or domains of conventional 4-chain antibodies (and in particular human antibodies) and/or of heavy chain antibodies. For example, although usually less preferred, a Nanobody of the invention may be linked to a conventional (preferably human) V_{H} or V_{L} domain or to a natural or synthetic analog of a V_{H} or V_{L} domain, again optionally via a linker sequence (including but not limited to other (single) domain antibodies, such as the dAb's described by Ward et al.).

[2285] The at least one Nanobody may also be linked to one or more (preferably human) C_{H}1, C_{H}2 and/or C_{H}3 domains, optionally via a linker sequence. For instance, a Nanobody linked to a suitable C_{H}I domain could for example be used—together with suitable light chains—to generate antibody fragments/structures analogous to conventional Fab fragments or F(ab′)₂ fragments, but in which one or (in case of an F(ab′)₂ fragment) one or both of the conventional V_{H} domains have been replaced by a Nanobody of the invention. Also, two Nanobodies could be linked to a C_{H}3 domain (optionally via a linker) to provide a construct with increased half-life in vivo.

[2286] According to one specific aspect of a polypeptide of the invention, one or more Nanobodies of the invention may be linked (optionally via a suitable linker or hinge region) to one or more constant domains (for example, 2 or 3 constant domains that can be used as part of/to form an Fc portion), to an Fc portion and/or to one or more antibody parts, fragments or domains that confer one or more effector functions to the polypeptide of the invention and/or may confer the ability to bind to one or more Fc receptors. For example, for this purpose, and without being limited thereto, the one or more further amino acid sequences may comprise one or more C_{H}2 and/or C_{H}3 domains of an antibody, such as from a heavy chain antibody (as described herein) and more preferably from a conventional human 4-chain antibody; and/or may form (part of) and Fc region, for example from IgG (e.g. from IgG1, IgG2, IgG3 or IgG4), from IgE or from another human Ig such as IgA, IgD or IgM. For example, WO 94/04678 describes heavy chain antibodies comprising a Camelid V_{HH} domain or a humanized derivative thereof (i.e. a Nanobody), in which the Camelidae C_{H}2 and/or C_{H}3 domain have been replaced by human C_{H}2 and C_{H}3 domains, so as to provide an immunoglobulin that consists of 2 heavy chains each comprising a Nanobody and human C_{H}2 and C_{H}3 domains (but no C_{H}1 domain), which immunoglobulin has the effector function provided by the C_{H}2 and C_{H}3 domains and which immunoglobulin can function without the presence of any light chains. Other amino acid sequences that can be suitably linked to the Nanobodies of the invention so as to provide an effector function will be clear to the skilled person, and may be chosen on the basis of the desired effector function(s). Reference is for example made to WO 04/058820, WO 99/42077; WO 02/056910 and WO 05/017148, as well as the review by Holliger and Hudson, supra; and to the non-prepublished U.S. provisional application by Ablynx N. V. entitled “Constructs comprising single variable domains and an Fc portion derived from IgE” which has a filing date of Dec. 4, 2007 and the corresponding PCT application based thereon (also invoked as priority for this application), which has the same filing date as the present application. Coupling of a Nanobody of the invention to an Fc portion may also lead to an increased half-life, compared to the corresponding Nanobody of the invention. For some applications, the use of an Fc portion and/or of constant domains (i.e. C_{H}2 and/or C_{H}3 domains) that confer increased half-life without any biologically significant effector function may also be suitable or even preferred. Other suitable constructs comprising one or more Nanobodies and one or more constant domains with increased half-life in vivo will be clear to the skilled person, and may for example comprise two Nanobodies linked to a C_{H}3 domain, optionally via a linker sequence. Generally, any fusion protein or derivatives with increased half-life will preferably have a molecular weight of more than 50 kD, the cut-off value for renal absorption.

[2287] In another one specific, but non-limiting, aspect, in order to form a polypeptide of the invention, one or more amino acid sequences of the invention may be linked (optionally via a suitable linker or hinge region) to naturally occurring, synthetic or semisynthetic constant domains (or analogs, variants, mutants, parts or fragments thereof) that have a reduced (or essentially no) tendency to self-associate into dimers (i.e. compared to constant domains that naturally occur in conventional 4-chain antibodies). Such monomeric (i.e. not self-associating) Fc chain variants, or fragments thereof, will be clear to the skilled person. For example, Helm et al., J Biol Chem 1996 271 7494, describe monomeric Fcε chain variants that can be used in the polypeptide chains of the invention.

[2288] Also, such monomeric Fc chain variants are preferably such that they are still capable of binding to the complement or the relevant Fc receptor(s) (depending on the Fc portion from which they are derived), and/or such that they still have some or all of the effector functions of the Fc portion from which they are derived (or at a reduced level still suitable for the intended use). Alternatively, in such a polypeptide chain of the invention, the monomeric Fc chain may be used to confer increased half-life upon the polypeptide chain, in which case the monomeric Fc chain may also have no or essentially no effector functions.

[2289] Bivalent/multivalent, bispecific/multispecific or biparatopic/multiparatopic polypeptides of the invention may also be linked to Fc portions, in order to provide polypeptide constructs of the type that is described in the non-prepublished U.S. provisional application entitled “immunoglobulin constructs” filed on Dec. 4, 2007 (also invoked as priority for this application) and the corresponding PCT application based thereon, which has the same filing date as the present application.

[2290] The further amino acid sequences may also form a signal sequence or leader sequence that directs secretion of the Nanobody or the polypeptide of the invention from a host cell upon synthesis (for example to provide a pre-, pro- or prepro-form of the polypeptide of the invention, depending on the host cell used to express the polypeptide of the invention).

[2291] The further amino acid sequence may also form a sequence or signal that allows the Nanobody or polypeptide of the invention to be directed towards and/or to penetrate or enter into specific organs, tissues, cells, or parts or compartments of cells, and/or that allows the Nanobody or polypeptide of the invention to penetrate or cross a biological barrier such as a cell membrane, a cell layer such as a layer of epithelial cells, a tumor including solid tumors, or the blood-brain-barrier. Suitable examples of such amino acid sequences will be clear to the skilled person, and for example include, but are not limited to, the “Peptrans” vectors mentioned above, the sequences described by Cardinale et al. and the amino acid sequences and antibody fragments known per se that can be used to express or produce the Nanobodies and polypeptides of the invention as so-called “intrabodies”, for example as described in WO 94/02610, WO 95/22618, U.S. Pat. No. 7,004,940, WO 03/014960, WO 99/07414; WO 05/01690; EP 1 512 696; and in Cattaneo, A. & Biocca, S. (1997) Intracellular Antibodies: Development and Applications. Landes and Springer-Verlag; and in Kontermann, Methods 34, (2004), 163-170, and the further references described therein.

[2292] For some applications, in particular for those applications in which it is intended to kill a cell that expresses the target against which the Nanobodies of the invention are directed (e.g. in the treatment of cancer), or to reduce or slow the growth and/or proliferation of such a cell, the Nanobodies of the invention may also be linked to a (cyto)toxic protein or polypeptide. Examples of such toxic proteins and polypeptides which can be linked to a Nanobody of the invention to provide—for example—a cytotoxic polypeptide of the invention will be clear to the skilled person and can for example be found in the prior art cited above and/or in the further description herein. One example is the so-called ADEPT™ technology described in WO 03/055527.

[2293] According to one preferred, but non-limiting aspect, said one or more further amino acid sequences comprise at least one further Nanobody, so as to provide a polypeptide of the invention that comprises at least two, such as three, four, five or more Nanobodies, in which said Nanobodies may optionally be linked via one or more linker sequences (as defined herein). Polypeptides of the invention that comprise two or more Nanobodies, of which at least one is a Nanobody of the invention, will also be referred to herein as “multivalent” polypeptides of the invention, and the Nanobodies present in such polypeptides will also be referred to herein as being in a “multivalent format”. For example a “bivalent” polypeptide of the invention comprises two Nanobodies, optionally linked via a linker sequence, whereas a “trivalent” polypeptide of the invention comprises three Nanobodies, optionally linked via two linker sequences; etc.; in which at least one of the Nanobodies present in the polypeptide, and up to all of the Nanobodies present in the polypeptide, is/are a Nanobody of the invention.

[2294] In a multivalent polypeptide of the invention, the two or more Nanobodies may be the same or different, and may be directed against the same antigen or antigenic determinant (for example against the same part(s) or epitope(s) or against different parts or epitopes) or may alternatively be directed against different antigens or antigenic determinants; or any suitable combination thereof. For example, a bivalent polypeptide of the invention may comprise (a) two identical Nanobodies; (b) a first Nanobody directed against a first antigenic determinant of a protein or antigen and a second Nanobody directed against the same antigenic determinant of said protein or antigen which is different from the first Nanobody; (c) a first Nanobody directed against a first antigenic determinant of a protein or antigen and a second Nanobody directed against another antigenic determinant of said protein or antigen; or (d) a first Nanobody directed against a first protein or antigen and a second Nanobody directed against a second protein or antigen (i.e. different from said first antigen). Similarly, a trivalent polypeptide of the invention may, for example and without being limited thereto. comprise (a) three identical Nanobodies; (b) two identical Nanobody against a first antigenic determinant of an antigen and a third Nanobody directed against a different antigenic determinant of the same antigen; (c) two identical Nanobody against a first antigenic determinant of an antigen and a third Nanobody directed against a second antigen different from said first antigen; (d) a first Nanobody directed against a first antigenic determinant of a first antigen, a second Nanobody directed against a second antigenic determinant of said first antigen and a third Nanobody directed against a second antigen different from said first antigen; or (e) a first Nanobody directed against a first antigen, a second Nanobody directed against a second antigen different from said first antigen, and a third Nanobody directed against a third antigen different from said first and second antigen.

[2295] Polypeptides of the invention that contain at least two Nanobodies, in which at least one Nanobody is directed against a first antigen (i.e. against heterodimeric cytokines and/or their receptors,) and at least one Nanobody is directed against a second antigen (i.e. different from heterodimeric cytokines and/or their receptors,), will also be referred to as “multispecific” polypeptides of the invention, and the Nanobodies present in such polypeptides will also be referred to herein as being in a “multispecific format”. Thus, for example, a “bispecific” polypeptide of the invention is a polypeptide that comprises at least one Nanobody directed against a first antigen (i.e. heterodimeric cytokines and/or their receptors,) and at least one further Nanobody directed against a second antigen (i.e. different from heterodimeric cytokines and/or their receptors,), whereas a “trispecific” polypeptide of the invention is a polypeptide that comprises at least one Nanobody directed against a first antigen (i.e. heterodimeric cytokines and/or their receptors,), at least one further Nanobody directed against a second antigen (i.e. different from heterodimeric cytokines and/or their receptors,) and at least one further Nanobody directed against a third antigen (i.e. different from both heterodimeric cytokines and/or their receptors, and the second antigen); etc.

[2296] Accordingly, in its simplest form, a bispecific polypeptide of the invention is a bivalent polypeptide of the invention (as defined herein), comprising a first Nanobody directed against heterodimeric cytokines and/or their receptors, and a second Nanobody directed against a second antigen, in which said first and second Nanobody may optionally be linked via a linker sequence (as defined herein); whereas a trispecific polypeptide of the invention in its simplest form is a trivalent polypeptide of the invention (as defined herein), comprising a first Nanobody directed against heterodimeric cytokines and/or their receptors, a second Nanobody directed against a second antigen and a third Nanobody directed against a third antigen, in which said first, second and third Nanobody may optionally be linked via one or more, and in particular one and more, in particular two, linker sequences.

[2297] However, as will be clear from the description hereinabove, the invention is not limited thereto, in the sense that a multispecific polypeptide of the invention may comprise at least one Nanobody against heterodimeric cytokines and/or their receptors, and any number of Nanobodies directed against one or more antigens different from heterodimeric cytokines and/or their receptors.

[2298] Furthermore, although it is encompassed within the scope of the invention that the specific order or arrangement of the various Nanobodies in the polypeptides of the invention may have some influence on the properties of the final polypeptide of the invention (including but not limited to the affinity, specificity or avidity for heterodimeric cytokines and/or their receptors, or against the one or more other antigens), said order or arrangement is usually not critical and may be suitably chosen by the skilled person, optionally after some limited routine experiments based on the disclosure herein. Thus, when reference is made to a specific multivalent or multispecific polypeptide of the invention, it should be noted that this encompasses any order or arrangements of the relevant Nanobodies, unless explicitly indicated otherwise.

[2299] Finally, it is also within the scope of the invention that the polypeptides of the invention contain two or more Nanobodies and one or more further amino acid sequences (as mentioned herein).

[2300] For multivalent and multispecific polypeptides containing one or more V_{HH} domains and their preparation, reference is also made to Conrath et al., J. Biol. Chem., Vol. 276, 10. 7346-7350, 2001; Muyldermans, Reviews in Molecular Biotechnology 74 (2001), 277-302; as well as to for example WO 96/34103 and WO 99/23221. Some other examples of some specific multispecific and/or multivalent polypeptide of the invention can be found in the applications by Ablynx N. V. referred to herein.

[2301] One preferred, but non-limiting example of a multispecific polypeptide of the invention comprises at least one Nanobody of the invention and at least one Nanobody that provides for an increased half-life. Such Nanobodies may for example be Nanobodies that are directed against a serum protein, and in particular a human serum protein, such as human serum albumin, thyroxine-binding protein, (human) transferrin, fibrinogen, an immunoglobulin such as IgG, IgE or IgM, or against one of the serum proteins listed in WO 04/003019. Of these, Nanobodies that can bind to serum albumin (and in particular human serum albumin) or to IgG (and in particular human IgG, see for example Nanobody VH-1 described in the review by Muyldermans, supra) are particularly preferred (although for example, for experiments in mice or primates, Nanobodies against or cross-reactive with mouse serum albumin (MSA) or serum albumin from said primate, respectively, can be used. However, for pharmaceutical use, Nanobodies against human serum albumin or human IgG will usually be preferred). Nanobodies that provide for increased half-life and that can be used in the polypeptides of the invention include the Nanobodies directed against serum albumin that are described in WO 04/041865, in WO 06/122787 and in the further patent applications by Ablynx N. V., such as those mentioned above.

[2302] For example, the some preferred Nanobodies that provide for increased half-life for use in the present invention include Nanobodies that can bind to amino acid residues on (human) serum albumin that are not involved in binding of serum albumin to FcRn (see for example WO 06/0122787); Nanobodies that are capable of binding to amino acid residues on serum albumin that do not form part of domain III of serum albumin (see for example WO 06/0122787); Nanobodies that have or can provide an increased half-life (see for example the U.S. provisional application 60/843,349 by Ablynx N.V mentioned herein; see also PCT/EP2007/059475); Nanobodies against human serum albumin that are cross-reactive with serum albumin from at least one species of mammal, and in particular with at least one species of primate (such as, without limitation, monkeys from the genus Macaca (such as, and in particular, cynomologus monkeys (Macaca fascicularis) and/or rhesus monkeys (Macaca mulatta)) and baboon (Papio ursinus)) (see for example the U.S. provisional application 60/843,349 by Ablynx N.V see also PCT/EP2007/059475); Nanobodies that can bind to serum albumin in a pH independent manner (see for example the U.S. provisional application 60/850,774 by Ablynx N. V. mentioned herein, see also WO 08/043821) and/or Nanobodies that are conditional binders (see for example the U.S. provisional application 60/850,775 by Ablynx N. V.; see also PCT/EP2007/060850).

[2303] Some particularly preferred Nanobodies that provide for increased half-life and that can be used in the polypeptides of the invention include the Nanobodies ALB-1 to ALB-10 disclosed in WO 06/122787 (see Tables II and III) of which ALB-8 (SEQ ID NO: 62 in WO 06/122787) is particularly preferred.

[2304] According to a specific, but non-limiting aspect of the invention, the polypeptides of the invention contain, besides the one or more Nanobodies of the invention, at least one Nanobody against human serum albumin.

[2305] Generally, any polypeptides of the invention with increased half-life that contain one or more Nanobodies of the invention, and any derivatives of Nanobodies of the invention or of such polypeptides that have an increased half-life, preferably have a half-life that is at least 1.5 times, preferably at least 2 times, such as at least 5 times, for example at least 10 times or more than 20 times, greater than the half-life of the corresponding Nanobody of the invention per se. For example, such a derivative or polypeptides with increased half-life may have a half-life that is increased with more than 1 hours, preferably more than 2 hours, more preferably more than 6 hours, such as more than 12 hours, or even more than 24, 48 or 72 hours, compared to the corresponding Nanobody of the invention per se.

[2306] In a preferred, but non-limiting aspect of the invention, such derivatives or polypeptides may exhibit a serum half-life in human of at least about 12 hours, preferably at least 24 hours, more preferably at least 48 hours, even more preferably at least 72 hours or more. For example, such derivatives or polypeptides may have a half-life of at least 5 days (such as about 5 to 10 days), preferably at least 9 days (such as about 9 to 14 days), more preferably at least about 10 days (such as about 10 to 15 days), or at least about 11 days (such as about 11 to 16 days), more preferably at least about 12 days (such as about 12 to 18 days or more), or more than 14 days (such as about 14 to 19 days).

[2307] According to one aspect of the invention the polypeptides are capable of binding to one or more molecules which can increase the half-life of the polypeptide in vivo.

[2308] The polypeptides of the invention are stabilised in vivo and their half-life increased by binding to molecules which resist degradation and/or clearance or sequestration. Typically, such molecules are naturally occurring proteins which themselves have a long half-life in vivo.

[2309] Another preferred, but non-limiting example of a multispecific polypeptide of the invention comprises at least one Nanobody of the invention and at least one Nanobody that directs the polypeptide of the invention towards, and/or that allows the polypeptide of the invention to penetrate or to enter into specific organs, tissues, cells, or parts or compartments of cells, and/or that allows the Nanobody to penetrate or cross a biological barrier such as a cell membrane, a cell layer such as a layer of epithelial cells, a tumor including solid tumors, or the blood-brain-barrier. Examples of such Nanobodies include Nanobodies that are directed towards specific cell-surface proteins, markers or epitopes of the desired organ, tissue or cell (for example cell-surface markers associated with tumor cells), and the single-domain brain targeting antibody fragments described in WO 02/057445 and WO 06/040153, of which FC44 (SEQ ID NO: 189 of WO 06/040153) and FC5 (SEQ ID NO: 190 of WO 06/040154) are preferred examples.

[2310] In the polypeptides of the invention, the one or more Nanobodies and the one or more polypeptides may be directly linked to each other (as for example described in WO 99/23221) and/or may be linked to each other via one or more suitable spacers or linkers, or any combination thereof.

[2311] Suitable spacers or linkers for use in multivalent and multispecific polypeptides will be clear to the skilled person, and may generally be any linker or spacer used in the art to link amino acid sequences. Preferably, said linker or spacer is suitable for use in constructing proteins or polypeptides that are intended for pharmaceutical use.

[2312] Some particularly preferred spacers include the spacers and linkers that are used in the art to link antibody fragments or antibody domains. These include the linkers mentioned in the general background art cited above, as well as for example linkers that are used in the art to construct diabodies or ScFv fragments (in this respect, however, its should be noted that, whereas in diabodies and in ScFv fragments, the linker sequence used should have a length, a degree of flexibility and other properties that allow the pertinent V_{H} and V_{L} domains to come together to form the complete antigen-binding site, there is no particular limitation on the length or the flexibility of the linker used in the polypeptide of the invention, since each Nanobody by itself forms a complete antigen-binding site).

[2313] For example, a linker may be a suitable amino acid sequence, and in particular amino acid sequences of between 1 and 50, preferably between 1 and 30, such as between 1 and 10 amino acid residues. Some preferred examples of such amino acid sequences include gly-ser linkers, for example of the type (glyₓser_{y})_{z}, such as (for example (gly₄ser)₃ or (gly₃ser₂)₃, as described in WO 99/42077 and the GS30, GS15, GS9 and GS7 linkers described in the applications by Ablynx mentioned herein (see for example WO 06/040153 and WO 06/122825), as well as hinge-like regions, such as the hinge regions of naturally occurring heavy chain antibodies or similar sequences (such as described in WO 94/04678).

[2314] Some other particularly preferred linkers are poly-alanine (such as AAA), as well as the linkers GS30 (SEQ ID NO: 85 in WO 06/122825) and GS9 (SEQ ID NO: 84 in WO 06/122825).

[2315] Other suitable linkers generally comprise organic compounds or polymers, in particular those suitable for use in proteins for pharmaceutical use. For instance, poly(ethyleneglycol) moieties have been used to link antibody domains, see for example WO 04/081026.

[2316] It is encompassed within the scope of the invention that the length, the degree of flexibility and/or other properties of the linker(s) used (although not critical, as it usually is for linkers used in ScFv fragments) may have some influence on the properties of the final polypeptide of the invention, including but not limited to the affinity, specificity or avidity for heterodimeric cytokines and/or their receptors, or for one or more of the other antigens. Based on the disclosure herein, the skilled person will be able to determine the optimal linker(s) for use in a specific polypeptide of the invention, optionally after some limited routine experiments.

[2317] For example, in multivalent polypeptides of the invention that comprise Nanobodies directed against a multimeric antigen (such as a multimeric receptor or other protein), the length and flexibility of the linker are preferably such that it allows each Nanobody of the invention present in the polypeptide to bind to the antigenic determinant on each of the subunits of the multimer. Similarly, in a multispecific polypeptide of the invention that comprises Nanobodies directed against two or more different antigenic determinants on the same antigen (for example against different epitopes of an antigen and/or against different subunits of a multimeric receptor, channel or protein), the length and flexibility of the linker are preferably such that it allows each Nanobody to bind to its intended antigenic determinant. Again, based on the disclosure herein, the skilled person will be able to determine the optimal linker(s) for use in a specific polypeptide of the invention, optionally after some limited routine experiments.

[2318] It is also within the scope of the invention that the linker(s) used confer one or more other favourable properties or functionality to the polypeptides of the invention, and/or provide one or more sites for the formation of derivatives and/or for the attachment of functional groups (e.g. as described herein for the derivatives of the Nanobodies of the invention). For example, linkers containing one or more charged amino acid residues (see Table A-3 above) can provide improved hydrophilic properties, whereas linkers that form or contain small epitopes or tags can be used for the purposes of detection, identification and/or purification. Again, based on the disclosure herein, the skilled person will be able to determine the optimal linkers for use in a specific polypeptide of the invention, optionally after some limited routine experiments.

[2319] Finally, when two or more linkers are used in the polypeptides of the invention, these linkers may be the same or different. Again, based on the disclosure herein, the skilled person will be able to determine the optimal linkers for use in a specific polypeptide of the invention, optionally after some limited routine experiments.

[2320] Usually, for easy of expression and production, a polypeptide of the invention will be a linear polypeptide. However, the invention in its broadest sense is not limited thererto. For example, when a polypeptide of the invention comprises three of more Nanobodies, it is possible to link them by use of a linker with three or more “arms”, which each “arm” being linked to a Nanobody, so as to provide a “star-shaped” construct. It is also possible, although usually less preferred, to use circular constructs.

[2321] The invention also comprises derivatives of the polypeptides of the invention, which may be essentially analogous to the derivatives of the Nanobodies of the invention, i.e. as described herein.

[2322] The invention also comprises proteins or polypeptides that “essentially consist” of a polypeptide of the invention (in which the wording “essentially consist of” has essentially the same meaning as indicated hereinabove).

[2323] According to one aspect of the invention, the polypeptide of the invention is in essentially isolated from, as defined herein.

[2324] The amino acid sequences, Nanobodies, polypeptides and nucleic acids of the invention can be prepared in a manner known per se, as will be clear to the skilled person from the further description herein. For example, the Nanobodies and polypetides of the invention can be prepared in any manner known per se for the preparation of antibodies and in particular for the preparation of antibody fragments (including but not limited to (single) domain antibodies and ScFv fragments). Some preferred, but non-limiting methods for preparing the amino acid sequences, Nanobodies, polypeptides and nucleic acids include the methods and techniques described herein.

[2325] As will be clear to the skilled person, one particularly useful method for preparing an amino acid sequence, Nanobody and/or a polypeptide of the invention generally comprises the steps of:
[2326] i) the expression, in a suitable host cell or host organism (also referred to herein as a “host of the invention”) or in another suitable expression system of a nucleic acid that encodes said amino acid sequence, Nanobody or polypeptide of the invention (also referred to herein as a “nucleic acid of the invention”), optionally followed by:
[2327] ii) isolating and/or purifying the amino acid sequence, Nanobody or polypeptide of the invention thus obtained.

[2328] In particular, such a method may comprise the steps of
[2329] i) cultivating and/or maintaining a host of the invention under conditions that are such that said host of the invention expresses and/or produces at least one amino acid sequence, Nanobody and/or polypeptide of the invention; optionally followed by:
[2330] ii) isolating and/or purifying the amino acid sequence, Nanobody or polypeptide of the invention thus obtained.

[2331] A nucleic acid of the invention can be in the form of single or double stranded DNA or RNA, and is preferably in the form of double stranded DNA. For example, the nucleotide sequences of the invention may be genomic DNA, cDNA or synthetic DNA (such as DNA with a codon usage that has been specifically adapted for expression in the intended host cell or host organism).

[2332] According to one aspect of the invention, the nucleic acid of the invention is in essentially isolated from, as defined herein.

[2333] The nucleic acid of the invention may also be in the form of, be present in and/or be part of a vector, such as for example a plasmid, cosmid or YAC, which again may be in essentially isolated form.

[2334] The nucleic acids of the invention can be prepared or obtained in a manner known per se, based on the information on the amino acid sequences for the polypeptides of the invention given herein, and/or can be isolated from a suitable natural source. To provide analogs, nucleotide sequences encoding naturally occurring V_{HH} domains can for example be subjected to site-directed mutagenesis, so at to provide a nucleic acid of the invention encoding said analog. Also, as will be clear to the skilled person, to prepare a nucleic acid of the invention, also several nucleotide sequences, such as at least one nucleotide sequence encoding a Nanobody and for example nucleic acids encoding one or more linkers can be linked together in a suitable manner.

[2335] Techniques for generating the nucleic acids of the invention will be clear to the skilled person and may for instance include, but are not limited to, automated DNA synthesis; site-directed mutagenesis; combining two or more naturally occurring and/or synthetic sequences (or two or more parts thereof), introduction of mutations that lead to the expression of a truncated expression product; introduction of one or more restriction sites (e.g. to create cassettes and/or regions that may easily be digested and/or ligated using suitable restriction enzymes), and/or the introduction of mutations by means of a PCR reaction using one or more “mismatched” primers, using for example a sequence of a naturally occurring form of heterodimeric cytokines and/or their receptors as a template. These and other techniques will be clear to the skilled person, and reference is again made to the standard handbooks, such as Sambrook et al. and Ausubel et al., mentioned above, as well as the Examples below.

[2336] The nucleic acid of the invention may also be in the form of, be present in and/or be part of a genetic construct, as will be clear to the person skilled in the art. Such genetic constructs generally comprise at least one nucleic acid of the invention that is optionally linked to one or more elements of genetic constructs known per se, such as for example one or more suitable regulatory elements (such as a suitable promoter(s), enhancer(s), terminator(s), etc.) and the further elements of genetic constructs referred to herein. Such genetic constructs comprising at least one nucleic acid of the invention will also be referred to herein as “genetic constructs of the invention”.

[2337] The genetic constructs of the invention may be DNA or RNA, and are preferably double-stranded DNA. The genetic constructs of the invention may also be in a form suitable for transformation of the intended host cell or host organism, in a form suitable for integration into the genomic DNA of the intended host cell or in a form suitable for independent replication, maintenance and/or inheritance in the intended host organism. For instance, the genetic constructs of the invention may be in the form of a vector, such as for example a plasmid, cosmid, YAC, a viral vector or transposon. In particular, the vector may be an expression vector, i.e. a vector that can provide for expression in vitro and/or in vivo (e.g. in a suitable host cell, host organism and/or expression system).

[2338] In a preferred but non-limiting aspect, a genetic construct of the invention comprises
[2339] i) at least one nucleic acid of the invention; operably connected to
[2340] ii) one or more regulatory elements, such as a promoter and optionally a suitable terminator;
   [2341] and optionally also
[2342] iii) one or more further elements of genetic constructs known per se;

[2343] in which the terms “regulatory element”, “promoter”, “terminator” and “operably connected” have their usual meaning in the art (as further described herein); and in which said “further elements” present in the genetic constructs may for example be 3′- or 5′-UTR sequences, leader sequences, selection markers, expression markers/reporter genes, and/or elements that may facilitate or increase (the efficiency of) transformation or integration. These and other suitable elements for such genetic constructs will be clear to the skilled person, and may for instance depend upon the type of construct used, the intended host cell or host organism; the manner in which the nucleotide sequences of the invention of interest are to be expressed (e.g. via constitutive, transient or inducible expression); and/or the transformation technique to be used. For example, regulatory requences, promoters and terminators known per se for the expression and production of antibodies and antibody fragments (including but not limited to (single) domain antibodies and ScFv fragments) may be used in an essentially analogous manner.

[2344] Preferably, in the genetic constructs of the invention, said at least one nucleic acid of the invention and said regulatory elements, and optionally said one or more further elements, are “operably linked” to each other, by which is generally meant that they are in a functional relationship with each other. For instance, a promoter is considered “operably linked” to a coding sequence if said promoter is able to initiate or otherwise control/regulate the transcription and/or the expression of a coding sequence (in which said coding sequence should be understood as being “under the control of” said promotor). Generally, when two nucleotide sequences are operably linked, they will be in the same orientation and usually also in the same reading frame. They will usually also be essentially contiguous, although this may also not be required.

[2345] Preferably, the regulatory and further elements of the genetic constructs of the invention are such that they are capable of providing their intended biological function in the intended host cell or host organism.

[2346] For instance, a promoter, enhancer or terminator should be “operable” in the intended host cell or host organism, by which is meant that (for example) said promoter should be capable of initiating or otherwise controlling/regulating the transcription and/or the expression of a nucleotide sequence—e.g. a coding sequence—to which it is operably linked (as defined herein).

[2347] Some particularly preferred promoters include, but are not limited to, promoters known per se for the expression in the host cells mentioned herein; and in particular promoters for the expression in the bacterial cells, such as those mentioned herein and/or those used in the Examples.

[2348] A selection marker should be such that it allows—i.e. under appropriate selection conditions—host cells and/or host organisms that have been (successfully) transformed with the nucleotide sequence of the invention to be distinguished from host cells/organisms that have not been (successfully) transformed. Some preferred, but non-limiting examples of such markers are genes that provide resistance against antibiotics (such as kanamycin or ampicillin), genes that provide for temperature resistance, or genes that allow the host cell or host organism to be maintained in the absence of certain factors, compounds and/or (food) components in the medium that are essential for survival of the non-transformed cells or organisms.

[2349] A leader sequence should be such that—in the intended host cell or host organism—it allows for the desired post-translational modifications and/or such that it directs the transcribed mRNA to a desired part or organelle of a cell. A leader sequence may also allow for secretion of the expression product from said cell. As such, the leader sequence may be any pro-, pre-, or prepro-sequence operable in the host cell or host organism. Leader sequences may not be required for expression in a bacterial cell. For example, leader sequences known per se for the expression and production of antibodies and antibody fragments (including but not limited to single domain antibodies and ScFv fragments) may be used in an essentially analogous manner.

[2350] An expression marker or reporter gene should be such that—in the host cell or host organism—it allows for detection of the expression of (a gene or nucleotide sequence present on) the genetic construct. An expression marker may optionally also allow for the localisation of the expressed product, e.g. in a specific part or organelle of a cell and/or in (a) specific cell(s), tissue(s), organ(s) or part(s) of a multicellular organism. Such reporter genes may also be expressed as a protein fusion with the amino acid sequence of the invention. Some preferred, but non-limiting examples include fluorescent proteins such as GFP.

[2351] Some preferred, but non-limiting examples of suitable promoters, terminator and further elements include those that can be used for the expression in the host cells mentioned herein; and in particular those that are suitable for expression in bacterial cells, such as those mentioned herein and/or those used in the Examples below. For some (further) non-limiting examples of the promoters, selection markers, leader sequences, expression markers and further elements that may be present/used in the genetic constructs of the invention—such as terminators, transcriptional and/or translational enhancers and/or integration factors—reference is made to the general handbooks such as Sambrook et al. and Ausubel et al. mentioned above, as well as to the examples that are given in WO 95/07463, WO 96/23810, WO 95/07463, WO 95/21191, WO 97/11094, WO 97/42320, WO 98/06737, WO 98/21355, U.S. Pat. No. 7,207,410, U.S. Pat. No. 5,693,492 and EP 1 085 089. Other examples will be clear to the skilled person. Reference is also made to the general background art cited above and the further references cited herein.

[2352] The genetic constructs of the invention may generally be provided by suitably linking the nucleotide sequence(s) of the invention to the one or more further elements described above, for example using the techniques described in the general handbooks such as Sambrook et al. and Ausubel et al., mentioned above.

[2353] Often, the genetic constructs of the invention will be obtained by inserting a nucleotide sequence of the invention in a suitable (expression) vector known per se. Some preferred, but non-limiting examples of suitable expression vectors are those used in the Examples below, as well as those mentioned herein.

[2354] The nucleic acids of the invention and/or the genetic constructs of the invention may be used to transform a host cell or host organism, i.e. for expression and/or production of the amino acid sequence, Nanobody or polypeptide of the invention. Suitable hosts or host cells will be clear to the skilled person, and may for example be any suitable fungal, prokaryotic or eukaryotic cell or cell line or any suitable fungal, prokaryotic or eukaryotic organism, for example:
[2355] a bacterial strain, including but not limited to gram-negative strains such as strains of Escherichia coli; of Proteus, for example of Proteus mirabilis; of Pseudomonas, for example of Pseudomonas fluorescens; and gram-positive strains such as strains of Bacillus, for example of Bacillus subtilis or of Bacillus brevis; of Streptomyces, for example of Streptomyces lividans; of Staphylococcus, for example of Staphylococcus carnosus; and of Lactococcus, for example of Lactococcus lactis;
[2356] a fungal cell, including but not limited to cells from species of Trichoderma, for example from Trichoderma reesei; of Neurospora, for example from Neurospora crassa; of Sordaria, for example from Sordaria macrospora; of Aspergillus, for example from Aspergillus niger or from Aspergillus sojae; or from other filamentous fungi;
[2357] a yeast cell, including but not limited to cells from species of Saccharomyces, for example of Saccharomyces cerevisiae; of Schizosaccharomyces, for example of Schizosaccharomyces pombe; of Pichia, for example of Pichia pastoris or of Pichia methanolica; of Hansenula, for example of Hansenula polymorpha; of Kluyveromyces, for example of Kluyveromyces lactis; of Arxula, for example of Arxula adeninivorans; of Yarrowia, for example of Yarrowia lipolytica;
[2358] an amphibian cell or cell line, such as Xenopus oocytes;
[2359] an insect-derived cell or cell line, such as cells/cell lines derived from lepidoptera, including but not limited to Spodoptera SF9 and Sf21 cells or cells/cell lines derived from Drosophila, such as Schneider and Kc cells;
[2360] a plant or plant cell, for example in tobacco plants; and/or
[2361] a mammalian cell or cell line, for example a cell or cell line derived from a human, a cell or a cell line from mammals including but not limited to CHO-cells, BHK-cells (for example BHK-21 cells) and human cells or cell lines such as HeLa, COS (for example COS-7) and PER.C6 cells;

[2362] as well as all other hosts or host cells known per se for the expression and production of antibodies and antibody fragments (including but not limited to (single) domain antibodies and ScFv fragments), which will be clear to the skilled person. Reference is also made to the general background art cited hereinabove, as well as to for example WO 94/29457; WO 96/34103; WO 99/42077; Frenken et al., (1998), supra; Riechmann and Muyldermans, (1999), supra; van der Linden, (2000), supra; Thomassen et al., (2002), supra; Joosten et al., (2003), supra; Joosten et al., (2005), supra; and the further references cited herein.

[2363] The amino acid sequences, Nanobodies and polypeptides of the invention can also be introduced and expressed in one or more cells, tissues or organs of a multicellular organism, for example for prophylactic and/or therapeutic purposes (e.g. as a gene therapy). For this purpose, the nucleotide sequences of the invention may be introduced into the cells or tissues in any suitable way, for example as such (e.g. using liposomes) or after they have been inserted into a suitable gene therapy vector (for example derived from retroviruses such as adenovirus, or parvoviruses such as adeno-associated virus). As will also be clear to the skilled person, such gene therapy may be performed in vivo and/or in situ in the body of a patient by administering a nucleic acid of the invention or a suitable gene therapy vector encoding the same to the patient or to specific cells or a specific tissue or organ of the patient; or suitable cells (often taken from the body of the patient to be treated, such as explanted lymphocytes, bone marrow aspirates or tissue biopsies) may be treated in vitro with a nucleotide sequence of the invention and then be suitably (re-)introduced into the body of the patient. All this can be performed using gene therapy vectors, techniques and delivery systems which are well known to the skilled person, and for example described in Culver, K. W., “Gene Therapy”, 1994, p. xii, Mary Ann Liebert, Inc., Publishers, New York, N.Y.); Giordano, Nature F Medicine 2 (1996), 534-539; Schaper, Circ. Res. 79 (1996), 911-919; Anderson, Science 256 (1992),808-813; Verma, Nature 389 (1994), 239; Isner, Lancet 348 (1996), 370-374; Muhlhauser, Circ. Res. 77 (1995), 1077-1086; Onodera, Blood 91; (1998), 30-36; Verma, Gene Ther. 5 (1998), 692-699; Nabel, Ann. N.Y. Acad. Sci.: 811 (1997), 289-292; Verzeletti, Hum. Gene Ther. 9 (1998), 2243-51; Wang, Nature Medicine 2 (1996), 714-716; WO 94/29469; WO 97/00957, U.S. Pat. No. 5,580,859; U.S. Pat. No. 5,5895466; or Schaper, Current Opinion in Biotechnology 7 (1996), 635-640. For example, in situ expression of ScFv fragments (Afanasieva et al., Gene Ther., 10, 1850-1859 (2003)) and of diabodies (Blanco et al., J. Immunol, 171, 1070-1077 (2003)) has been described in the art.

[2364] For expression of the Nanobodies in a cell, they may also be expressed as so-called “intrabodies”, as for example described in WO 94/02610, WO 95/22618 and U.S. Pat. No. 7,004,940; WO 03/014960; in Cattaneo, A. & Biocca, S. (1997) Intracellular Antibodies: Development and Applications. Landes and Springer-Verlag; and in Kontermann, Methods 34, (2004), 163-170.

[2365] The amino acid sequences, Nanobodies and polypeptides of the invention can for example also be produced in the milk of transgenic mammals, for example in the milk of rabbits, cows, goats or sheep (see for example U.S. Pat. No. 6,741,957, U.S. Pat. No. 6,304,489 and U.S. Pat. No. 6,849,992 for general techniques for introducing transgenes into mammals), in plants or parts of plants including but not limited to their leaves, flowers, fruits, seed, roots or turbers (for example in tobacco, maize, soybean or alfalfa) or in for example pupae of the silkworm Bombix mori.

[2366] Furthermore, the amino acid sequences, Nanobodies and polypeptides of the invention can also be expressed and/or produced in cell-free expression systems, and suitable examples of such systems will be clear to the skilled person. Some preferred, but non-limiting examples include expression in the wheat germ system; in rabbit reticulocyte lysates; or in the E. coli Zubay system.

[2367] As mentioned above, one of the advantages of the use of Nanobodies is that the polypeptides based thereon can be prepared through expression in a suitable bacterial system, and suitable bacterial expression systems, vectors, host cells, regulatory elements, etc., will be clear to the skilled person, for example from the references cited above. It should however be noted that the invention in its broadest sense is not limited to expression in bacterial systems.

[2368] Preferably, in the invention, an (in vivo or in vitro) expression system, such as a bacterial expression system, is used that provides the polypeptides of the invention in a form that is suitable for pharmaceutical use, and such expression systems will again be clear to the skilled person. As also will be clear to the skilled person, polypeptides of the invention suitable for pharmaceutical use can be prepared using techniques for peptide synthesis.

[2369] For production on industrial scale, preferred heterologous hosts for the (industrial) production of Nanobodies or Nanobody-containing protein therapeutics include strains of E. coli, Pichia pastoris, S. cerevisiae that are suitable for large scale expression/production/fermentation, and in particular for large scale pharmaceutical (i.e. GMP grade) expression/production/fermentation. Suitable examples of such strains will be clear to the skilled person. Such strains and production/expression systems are also made available by companies such as Biovitrum (Uppsala, Sweden).

[2370] Alternatively, mammalian cell lines, in particular Chinese hamster ovary (CHO) cells, can be used for large scale expression/production/fermentation, and in particular for large scale pharmaceutical expression/production/fermentation. Again, such expression/production systems are also made available by some of the companies mentioned above.

[2371] The choice of the specific expression system would depend in part on the requirement for certain post-translational modifications, more specifically glycosylation. The production of a Nanobody-containing recombinant protein for which glycosylation is desired or required would necessitate the use of mammalian expression hosts that have the ability to glycosylate the expressed protein. In this respect, it will be clear to the skilled person that the glycosylation pattern obtained (i.e. the kind, number and position of residues attached) will depend on the cell or cell line that is used for the expression. Preferably, either a human cell or cell line is used (i.e. leading to a protein that essentially has a human glycosylation pattern) or another mammalian cell line is used that can provide a glycosylation pattern that is essentially and/or functionally the same as human glycosylation or at least mimics human glycosylation. Generally, prokaryotic hosts such as E. coli do not have the ability to glycosylate proteins, and the use of lower eukaryotes such as yeast usually leads to a glycosylation pattern that differs from human glycosylation. Nevertheless, it should be understood that all the foregoing host cells and expression systems can be used in the invention, depending on the desired amino acid sequence, Nanobody or polypeptide to be obtained.

[2372] Thus, according to one non-limiting aspect of the invention, the amino acid sequence, Nanobody or polypeptide of the invention is glycosylated. According to another non-limiting aspect of the invention, the amino acid sequence, Nanobody or polypeptide of the invention is non-glycosylated.

[2373] According to one preferred, but non-limiting aspect of the invention, the amino acid sequence, Nanobody or polypeptide of the invention is produced in a bacterial cell, in particular a bacterial cell suitable for large scale pharmaceutical production, such as cells of the strains mentioned above.

[2374] According to another preferred, but non-limiting aspect of the invention, the amino acid sequence, Nanobody or polypeptide of the invention is produced in a yeast cell, in particular a yeast cell suitable for large scale pharmaceutical production, such as cells of the species mentioned above.

[2375] According to yet another preferred, but non-limiting aspect of the invention, the amino acid sequence, Nanobody or polypeptide of the invention is produced in a mammalian cell, in particular in a human cell or in a cell of a human cell line, and more in particular in a human cell or in a cell of a human cell line that is suitable for large scale pharmaceutical production, such as the cell lines mentioned hereinabove.

[2376] When expression in a host cell is used to produce the amino acid sequences, Nanobodies and the polypeptides of the invention, the amino acid sequences, Nanobodies and polypeptides of the invention can be produced either intracellullarly (e.g. in the cytosol, in the periplasma or in inclusion bodies) and then isolated from the host cells and optionally further purified; or can be produced extracellularly (e.g. in the medium in which the host cells are cultured) and then isolated from the culture medium and optionally further purified. When eukaryotic host cells are used, extracellular production is usually preferred since this considerably facilitates the further isolation and downstream processing of the Nanobodies and proteins obtained. Bacterial cells such as the strains of E. coli mentioned above normally do not secrete proteins extracellularly, except for a few classes of proteins such as toxins and hemolysin, and secretory production in E. coli refers to the translocation of proteins across the inner membrane to the periplasmic space. Periplasmic production provides several advantages over cytosolic production. For example, the N-terminal amino acid sequence of the secreted product can be identical to the natural gene product after cleavage of the secretion signal sequence by a specific signal peptidase. Also, there appears to be much less protease activity in the periplasm than in the cytoplasm. In addition, protein purification is simpler due to fewer contaminating proteins in the periplasm. Another advantage is that correct disulfide bonds may form because the periplasm provides a more oxidative environment than the cytoplasm. Proteins overexpressed in E. coli are often found in insoluble aggregates, so-called inclusion bodies. These inclusion bodies may be located in the cytosol or in the periplasm; the recovery of biologically active proteins from these inclusion-bodies requires a denaturation/refolding process. Many recombinant proteins, including therapeutic proteins, are recovered from inclusion bodies. Alternatively, as will be clear to the skilled person, recombinant strains of bacteria that have been genetically modified so as to secrete a desired protein, and in particular an amino acid sequence, Nanobody or a polypeptide of the invention, can be used.

[2377] Thus, according to one non-limiting aspect of the invention, the amino acid sequence, Nanobody or polypeptide of the invention is an amino acid sequence, Nanobody or polypeptide that has been produced intracellularly and that has been isolated from the host cell, and in particular from a bacterial cell or from an inclusion body in a bacterial cell. According to another non-limiting aspect of the invention, the amino acid sequence, Nanobody or polypeptide of the invention is an amino acid sequence, Nanobody or polypeptide that has been produced extracellularly, and that has been isolated from the medium in which the host cell is cultivated.

[2378] Some preferred, but non-limiting promoters for use with these host cells include,
[2379] for expression in E. coli: lac promoter (and derivatives thereof such as the lacUV5 promoter); arabinose promoter; left- (PL) and rightward (PR) promoter of phage lambda; promoter of the trp operon; hybrid lac/trp promoters (tac and trc); T7-promoter (more specifically that of T7-phage gene 10) and other T-phage promoters; promoter of the Tn10 tetracycline resistance gene; engineered variants of the above promoters that include one or more copies of an extraneous regulatory operator sequence;
[2380] for expression in S. cerevisiae: constitutive: ADH1 (alcohol dehydrogenase 1), ENO (enolase), CYC1 (cytochrome c iso-1), GAPDH (glyceraldehydes-3-phosphate dehydrogenase), PGK1 (phosphoglycerate kinase), PYK1 (pyruvate kinase); regulated: GAL1,10,7 (galactose metabolic enzymes), ADH2 (alcohol dehydrogenase 2), PHO5 (acid phosphatase), CUP1 (copper metallothionein); heterologous: CaMV (cauliflower mosaic virus 35S promoter);
[2381] for expression in Pichia pastoris: the AOX1 promoter (alcohol oxidase I);
[2382] for expression in mammalian cells: human cytomegalovirus (heterodimeric cytokinesMV) immediate early enhancer/promoter; human cytomegalovirus (heterodimeric cytokinesMV) immediate early promoter variant that contains two tetracycline operator sequences such that the promoter can be regulated by the Tet repressor; Herpes Simplex Virus thymidine kinase (TK) promoter; Rous Sarcoma Virus long terminal repeat (RSV LTR) enhancer/promoter; elongation factor 1α (hEF-1α) promoter from human, chimpanzee, mouse or rat; the SV40 early promoter; HIV-1 long terminal repeat promoter; β-actin promoter;

[2383] Some preferred, but non-limiting vectors for use with these host cells include:
[2384] vectors for expression in mammalian cells: pMAMneo (Clontech), pcDNA3 (Invitrogen), pMC1neo (Stratagene), pSG5 (Stratagene), EBO-pSV2-neo (ATCC 37593), pBPV-1 (8-2) (ATCC 37110), pdBPV-MMTneo (342-12) (ATCC 37224), pRSVgpt (ATCC37199), pRSVneo (ATCC37198), pSV2-dhfr (ATCC 37146), pUCTag (ATCC 37460) and 1ZD35 (ATCC 37565), as well as viral-based expression systems, such as those based on adenovirus;
[2385] vectors for expression in bacterial cells: pET vectors (Novagen) and pQE vectors (Qiagen);
[2386] vectors for expression in yeast or other fungal cells: pYES2 (Invitrogen) and Pichia expression vectors (Invitrogen);
[2387] vectors for expression in insect cells: pBlueBacil (Invitrogen) and other baculovirus vectors
[2388] vectors for expression in plants or plant cells: for example vectors based on cauliflower mosaic virus or tobacco mosaic virus, suitable strains of Agrobacterium, or Ti-plasmid based vectors.

[2389] Some preferred, but non-limiting secretory sequences for use with these host cells include:
[2390] for use in bacterial cells such as E. coli: PelB, Bla, OmpA, OmpC, OmpF, OmpT, StII, PhoA, PhoE, MalE, Lpp, LamB, and the like; TAT signal peptide, hemolysin C-terminal secretion signal;
[2391] for use in yeast: α-mating factor prepro-sequence, phosphatase (pho1), invertase (Suc), etc.;
[2392] for use in mammalian cells: indigenous signal in case the target protein is of eukaryotic origin; murine Ig κ-chain V-J2-C signal peptide; etc.

[2393] Suitable techniques for transforming a host or host cell of the invention will be clear to the skilled person and may depend on the intended host cell/host organism and the genetic construct to be used. Reference is again made to the handbooks and patent applications mentioned above.

[2394] After transformation, a step for detecting and selecting those host cells or host organisms that have been succesfully transformed with the nucleotide sequence/genetic construct of the invention may be performed. This may for instance be a selection step based on a selectable marker present in the genetic construct of the invention or a step involving the detection of the amino acid sequence of the invention, e.g. using specific antibodies.

[2395] The transformed host cell (which may be in the form or a stable cell line) or host organisms (which may be in the form of a stable mutant line or strain) form further aspects of the present invention.

[2396] Preferably, these host cells or host organisms are such that they express, or are (at least) capable of expressing (e.g. under suitable conditions), an amino acid sequence, Nanobody or polypeptide of the invention (and in case of a host organism: in at least one cell, part, tissue or organ thereof). The invention also includes further generations, progeny and/or offspring of the host cell or host organism of the invention, that may for instance be obtained by cell division or by sexual or asexual reproduction.

[2397] To produce/obtain expression of the amino acid sequences of the invention, the transformed host cell or transformed host organism may generally be kept, maintained and/or cultured under conditions such that the (desired) amino acid sequence, Nanobody or polypeptide of the invention is expressed/produced. Suitable conditions will be clear to the skilled person and will usually depend upon the host cell/host organism used, as well as on the regulatory elements that control the expression of the (relevant) nucleotide sequence of the invention. Again, reference is made to the handbooks and patent applications mentioned above in the paragraphs on the genetic constructs of the invention.

[2398] Generally, suitable conditions may include the use of a suitable medium, the presence of a suitable source of food and/or suitable nutrients, the use of a suitable temperature, and optionally the presence of a suitable inducing factor or compound (e.g. when the nucleotide sequences of the invention are under the control of an inducible promoter); all of which may be selected by the skilled person. Again, under such conditions, the amino acid sequences of the invention may be expressed in a constitutive manner, in a transient manner, or only when suitably induced.

[2399] It will also be clear to the skilled person that the amino acid sequence, Nanobody or polypeptide of the invention may (first) be generated in an immature form (as mentioned above), which may then be subjected to post-translational modification, depending on the host cell/host organism used. Also, the amino acid sequence, Nanobody or polypeptide of the invention may be glycosylated, again depending on the host cell/host organism used.

[2400] The amino acid sequence, Nanobody or polypeptide of the invention may then be isolated from the host cell/host organism and/or from the medium in which said host cell or host organism was cultivated, using protein isolation and/or purification techniques known per se, such as (preparative) chromatography and/or electrophoresis techniques, differential precipitation techniques, affinity techniques (e.g. using a specific, cleavable amino acid sequence fused with the amino acid sequence, Nanobody or polypeptide of the invention) and/or preparative immunological techniques (i.e. using antibodies against the amino acid sequence to be isolated).

[2401] Generally, for pharmaceutical use, the polypeptides of the invention may be formulated as a pharmaceutical preparation or compositions comprising at least one polypeptide of the invention and at least one pharmaceutically acceptable carrier, diluent or excipient and/or adjuvant, and optionally one or more further pharmaceutically active polypeptides and/or compounds. By means of non-limiting examples, such a formulation may be in a form suitable for oral administration, for parenteral administration (such as by intravenous, intramuscular or subcutaneous injection or intravenous infusion), for topical administration (for example, as a cream for the prevention and/or treatment of superficial inflammation, such as psoriasis), for administration by inhalation, by a skin patch, by an implant, by a suppository, etc. Such suitable administration forms—which may be solid, semi-solid or liquid, depending on the manner of administration—as well as methods and carriers for use in the preparation thereof, will be clear to the skilled person, and are further described herein.

[2402] Thus, in a further aspect, the invention relates to a pharmaceutical composition that contains at least one amino acid of the invention, at least one Nanobody of the invention or at least one polypeptide of the invention and at least one suitable carrier, diluent or excipient (i.e. suitable for pharmaceutical use), and optionally one or more further active substances.

[2403] Generally, the amino acid sequences, Nanobodies and polypeptides of the invention can be formulated and administered in any suitable manner known per se, for which reference is for example made to the general background art cited above (and in particular to WO 04/041862, WO 04/041863, WO 04/041865 and WO 04/041867) as well as to the standard handbooks, such as Remington's Pharmaceutical Sciences, 18^{th} Ed., Mack Publishing Company, USA (1990) or Remington, the Science and Practice of Pharmacy, 21th Edition, Lippincott Williams and Wilkins (2005).

[2404] For example, the amino acid sequences, Nanobodies and polypeptides of the invention may be formulated and administered in any manner known per se for conventional antibodies and antibody fragments (including ScFv's and diabodies) and other pharmaceutically active proteins. Such formulations and methods for preparing the same will be clear to the skilled person, and for example include preparations suitable for parenteral administration (for example intravenous, intraperitoneal, subcutaneous, intramuscular, intraluminal, intra-arterial or intrathecal administration) or for topical (i.e. transdermal or intradermal) administration.

[2405] Preparations for parenteral administration may for example be sterile solutions, suspensions, dispersions or emulsions that are suitable for infusion or injection. Suitable carriers or diluents for such preparations for example include, without limitation, sterile water and aqueous buffers and solutions such as physiological phosphate-buffered saline, Ringer's solutions, dextrose solution, and Hank's solution; water oils; glycerol; ethanol; glycols such as propylene glycol or as well as mineral oils, animal oils and vegetable oils, for example peanut oil, soybean oil, as well as suitable mixtures thereof. Usually, aqueous solutions or suspensions will be preferred.

[2406] The amino acid sequences, Nanobodies and polypeptides of the invention can also be administered using gene therapy methods of delivery. See, e.g., U.S. Pat. No. 5,399,346, which is incorporated by reference in its entirety. Using a gene therapy method of delivery, primary cells transfected with the gene encoding an amino acid sequence, Nanobody or polypeptide of the invention can additionally be transfected with tissue specific promoters to target specific organs, tissue, grafts, tumors, or cells and can additionally be transfected with signal and stabilization sequences for subcellularly localized expression.

[2407] Thus, the amino acid sequences, Nanobodies and polypeptides of the invention may be systemically administered, e.g., orally, in combination with a pharmaceutically acceptable vehicle such as an inert diluent or an assimilable edible carrier. They may be enclosed in hard or soft shell gelatin capsules, may be compressed into tablets, or may be incorporated directly with the food of the patient's diet. For oral therapeutic administration, the amino acid sequences, Nanobodies and polypeptides of the invention may be combined with one or more excipients and used in the form of ingestible tablets, buccal tablets, troches, capsules, elixirs, suspensions, syrups, wafers, and the like. Such compositions and preparations should contain at least 0.1% of the amino acid sequence, Nanobody or polypeptide of the invention. Their percentage in the compositions and preparations may, of course, be varied and may conveniently be between about 2 to about 60% of the weight of a given unit dosage form. The amount of the amino acid sequence, Nanobody or polypeptide of the invention in such therapeutically useful compositions is such that an effective dosage level will be obtained.

[2408] The tablets, troches, pills, capsules, and the like may also contain the following: binders such as gum tragacanth, acacia, corn starch or gelatin; excipients such as dicalcium phosphate; a disintegrating agent such as corn starch, potato starch, alginic acid and the like; a lubricant such as magnesium stearate; and a sweetening agent such as sucrose, fructose, lactose or aspartame or a flavoring agent such as peppermint, oil of wintergreen, or cherry flavoring may be added. When the unit dosage form is a capsule, it may contain, in addition to materials of the above type, a liquid carrier, such as a vegetable oil or a polyethylene glycol. Various other materials may be present as coatings or to otherwise modify the physical form of the solid unit dosage form. For instance, tablets, pills, or capsules may be coated with gelatin, wax, shellac or sugar and the like. A syrup or elixir may contain the amino acid sequences, Nanobodies and polypeptides of the invention, sucrose or fructose as a sweetening agent, methyl and propylparabens as preservatives, a dye and flavoring such as cherry or orange flavor. Of course, any material used in preparing any unit dosage form should be pharmaceutically accepTable And substantially non-toxic in the amounts employed. In addition, the amino acid sequences, Nanobodies and polypeptides of the invention may be incorporated into sustained-release preparations and devices.

[2409] Preparations and formulations for oral administration may also be provided with an enteric coating that will allow the constructs of the invention to resist the gastric environment and pass into the intestines. More generally, preparations and formulations for oral administration may be suitably formulated for delivery into any desired part of the gastrointestinal tract. In addition, suitable suppositories may be used for delivery into the gastrointestinal tract.

[2410] The amino acid sequences, Nanobodies and polypeptides of the invention may also be administered intravenously or intraperitoneally by infusion or injection. Solutions of the amino acid sequences, Nanobodies and polypeptides of the invention or their salts can be prepared in water, optionally mixed with a nontoxic surfactant. Dispersions can also be prepared in glycerol, liquid polyethylene glycols, triacetin, and mixtures thereof and in oils. Under ordinary conditions of storage and use, these preparations contain a preservative to prevent the growth of microorganisms.

[2411] The pharmaceutical dosage forms suitable for injection or infusion can include sterile aqueous solutions or dispersions or sterile powders comprising the active ingredient which are adapted for the extemporaneous preparation of sterile injectable or infusible solutions or dispersions, optionally encapsulated in liposomes. In all cases, the ultimate dosage form must be sterile, fluid and stable under the conditions of manufacture and storage. The liquid carrier or vehicle can be a solvent or liquid dispersion medium comprising, for example, water, ethanol, a polyol (for example, glycerol, propylene glycol, liquid polyethylene glycols, and the like), vegetable oils, nontoxic glyceryl esters, and suitable mixtures thereof. The proper fluidity can be maintained, for example, by the formation of liposomes, by the maintenance of the required particle size in the case of dispersions or by the use of surfactants. The prevention of the action of microorganisms can be brought about by various antibacterial and antifungal agents, for example, parabens, chlorobutanol, phenol, sorbic acid, thimerosal, and the like. In many cases, it will be preferable to include isotonic agents, for example, sugars, buffers or sodium chloride. Prolonged absorption of the injectable compositions can be brought about by the use in the compositions of agents delaying absorption, for example, aluminum monostearate and gelatin.

[2412] Sterile injectable solutions are prepared by incorporating the amino acid sequences, Nanobodies and polypeptides of the invention in the required amount in the appropriate solvent with various of the other ingredients enumerated above, as required, followed by filter sterilization. In the case of sterile powders for the preparation of sterile injectable solutions, the preferred methods of preparation are vacuum drying and the freeze drying techniques, which yield a powder of the active ingredient plus any additional desired ingredient present in the previously sterile-filtered solutions.

[2413] For topical administration, the amino acid sequences, Nanobodies and polypeptides of the invention may be applied in pure form, i.e., when they are liquids. However, it will generally be desirable to administer them to the skin as compositions or formulations, in combination with a dermatologically acceptable carrier, which may be a solid or a liquid.

[2414] Useful solid carriers include finely divided solids such as talc, clay, microcrystalline cellulose, silica, alumina and the like. Useful liquid carriers include water, hydroxyalkyls or glycols or water-alcohol/glycol blends, in which the amino acid sequences, Nanobodies and polypeptides of the invention can be dissolved or dispersed at effective levels, optionally with the aid of non-toxic surfactants. Adjuvants such as fragrances and additional antimicrobial agents can be added to optimize the properties for a given use. The resultant liquid compositions can be applied from absorbent pads, used to impregnate bandages and other dressings, or sprayed onto the affected area using pump-type or aerosol sprayers.

[2415] Thickeners such as synthetic polymers, fatty acids, fatty acid salts and esters, fatty alcohols, modified celluloses or modified mineral materials can also be employed with liquid carriers to form spreadable pastes, gels, ointments, soaps, and the like, for application directly to the skin of the user.

[2416] Examples of useful dermatological compositions which can be used to deliver the amino acid sequences, Nanobodies and polypeptides of the invention to the skin are known to the art; for example, see Jacquet et al. (U.S. Pat. No. 4,608,392), Geria (U.S. Pat. No. 4,992,478), Smith et al. (U.S. Pat. No. 4,559,157) and Wortzman (U.S. Pat. No. 4,820,508).

[2417] Useful dosages of the amino acid sequences, Nanobodies and polypeptides of the invention can be determined by comparing their in vitro activity, and in vivo activity in animal models. Methods for the extrapolation of effective dosages in mice, and other animals, to humans are known to the art; for example, see U.S. Pat. No. 4,938,949.

[2418] Generally, the concentration of the amino acid sequences, Nanobodies and polypeptides of the invention in a liquid composition, such as a lotion, will be from about 0.1-25 wt-%, preferably from about 0.5-10 wt-%. The concentration in a semi-solid or solid composition such as a gel or a powder will be about 0.1-5 wt-%, preferably about 0.5-2.5 wt-%.

[2419] The amount of the amino acid sequences, Nanobodies and polypeptides of the invention required for use in treatment will vary not only with the particular amino acid sequence, Nanobody or polypeptide selected but also with the route of administration, the nature of the condition being treated and the age and condition of the patient and will be ultimately at the discretion of the attendant physician or clinician. Also the dosage of the amino acid sequences, Nanobodies and polypeptides of the invention varies depending on the target cell, tumor, tissue, graft, or organ.

[2420] The desired dose may conveniently be presented in a single dose or as divided doses administered at appropriate intervals, for example, as two, three, four or more sub-doses per day. The sub-dose itself may be further divided, e.g., into a number of discrete loosely spaced administrations; such as multiple inhalations from an insufflator or by application of a plurality of drops into the eye.

[2421] An administration regimen could include long-term, daily treatment. By “long-term” is meant at least two weeks and preferably, several weeks, months, or years of duration. Necessary modifications in this dosage range may be determined by one of ordinary skill in the art using only routine experimentation given the teachings herein. See Remington's Pharmaceutical Sciences (Martin, E. W., ed. 4), Mack Publishing Co., Easton, Pa. The dosage can also be adjusted by the individual physician in the event of any complication.

[2422] In another aspect, the invention relates to a method for the prevention and/or treatment of at least one diseases and disorders associated with heterodimeric cytokines and their receptors, said method comprising administering, to a subject in need thereof, a pharmaceutically active amount of an amino acid sequence of the invention, of a Nanobody of the invention, of a polypeptide of the invention, and/or of a pharmaceutical composition comprising the same.

[2423] In the context of the present invention, the term “prevention and/or treatment” not only comprises preventing and/or treating the disease, but also generally comprises preventing the onset of the disease, slowing or reversing the progress of disease, preventing or slowing the onset of one or more symptoms associated with the disease, reducing and/or alleviating one or more symptoms associated with the disease, reducing the severity and/or the duration of the disease and/or of any symptoms associated therewith and/or preventing a further increase in the severity of the disease and/or of any symptoms associated therewith, preventing, reducing or reversing any physiological damage caused by the disease, and generally any pharmacological action that is beneficial to the patient being treated.

[2424] The subject to be treated may be any warm-blooded animal, but is in particular a mammal, and more in particular a human being. As will be clear to the skilled person, the subject to be treated will in particular be a person suffering from, or at risk of, the diseases and disorders mentioned herein.

[2425] The invention relates to a method for the prevention and/or treatment of at least one disease or disorder that is associated with heterodimeric cytokines and/or their receptors, with its biological or pharmacological activity, and/or with the biological pathways or signalling in which heterodimeric cytokines and/or their receptors is involved, said method comprising administering, to a subject in need thereof, a pharmaceutically active amount of an amino acid sequence of the invention, of a Nanobody of the invention, of a polypeptide of the invention, and/or of a pharmaceutical composition comprising the same. In particular, the invention relates to a method for the prevention and/or treatment of at least one disease or disorder that can be treated by modulating heterodimeric cytokines and/or their receptors, its biological or pharmacological activity, and/or the biological pathways or signalling in which heterodimeric cytokines and/or their receptors is involved, said method comprising administering, to a subject in need thereof, a pharmaceutically active amount of an amino acid sequence of the invention, of a Nanobody of the invention, of a polypeptide of the invention, and/or of a pharmaceutical composition comprising the same. In particular, said pharmaceutically effective amount may be an amount that is sufficient to modulate heterodimeric cytokines and/or their receptors, its biological or pharmacological activity, and/or the biological pathways or signalling in which heterodimeric cytokines and/or their receptors is involved; and/or an amount that provides a level of the amino acid sequence of the invention, of a Nanobody of the invention, of a polypeptide of the invention in the circulation that is sufficient to modulate heterodimeric cytokines and/or their receptors, its biological or pharmacological activity, and/or the biological pathways or signalling in which heterodimeric cytokines and/or their receptors is involved.

[2426] The invention furthermore relates to a method for the prevention and/or treatment of at least one disease or disorder that can be prevented and/or treated by administering an amino acid sequence of the invention, a Nanobody of the invention or a polypeptide of the invention to a patient, said method comprising administering, to a subject in need thereof, a pharmaceutically active amount of an amino acid sequence of the invention, of a Nanobody of the invention, of a polypeptide of the invention, and/or of a pharmaceutical composition comprising the same.

[2427] More in particular, the invention relates to a method for the prevention and/or treatment of at least one disease or disorder chosen from the group consisting of the diseases and disorders listed herein, said method comprising administering, to a subject in need thereof, a pharmaceutically active amount of an amino acid sequence of the invention, of a Nanobody of the invention, of a polypeptide of the invention, and/or of a pharmaceutical composition comprising the same.

[2428] In another aspect, the invention relates to a method for immunotherapy, and in particular for passive immunotherapy, which method comprises administering, to a subject suffering from or at risk of the diseases and disorders mentioned herein, a pharmaceutically active amount of an amino acid sequence of the invention, of a Nanobody of the invention, of a polypeptide of the invention, and/or of a pharmaceutical composition comprising the same.

[2429] In the above methods, the amino acid sequences, Nanobodies and/or polypeptides of the invention and/or the compositions comprising the same can be administered in any suitable manner, depending on the specific pharmaceutical formulation or composition to be used. Thus, the amino acid sequences, Nanobodies and/or polypeptides of the invention and/or the compositions comprising the same can for example be administered orally, intraperitoneally (e.g. intravenously, subcutaneously, intramuscularly, or via any other route of administration that circumvents the gastrointestinal tract), intranasally, transdermally, topically, by means of a suppository, by inhalation, again depending on the specific pharmaceutical formulation or composition to be used. The clinician will be able to select a suitable route of administration and a suitable pharmaceutical formulation or composition to be used in such administration, depending on the disease or disorder to be prevented or treated and other factors well known to the clinician.

[2430] The amino acid sequences, Nanobodies and/or polypeptides of the invention and/or the compositions comprising the same are administered according to a regime of treatment that is suitable for preventing and/or treating the disease or disorder to be prevented or treated. The clinician will generally be able to determine a suitable treatment regimen, depending on factors such as the disease or disorder to be prevented or treated, the severity of the disease to be treated and/or the severity of the symptoms thereof, the specific amino acid sequence, Nanobody or polypeptide of the invention to be used, the specific route of administration and pharmaceutical formulation or composition to be used, the age, gender, weight, diet, general condition of the patient, and similar factors well known to the clinician.

[2431] Generally, the treatment regimen will comprise the administration of one or more amino acid sequences, Nanobodies and/or polypeptides of the invention, or of one or more compositions comprising the same, in one or more pharmaceutically effective amounts or doses. The specific amount(s) or doses to administered can be determined by the clinician, again based on the factors cited above.

[2432] Generally, for the prevention and/or treatment of the diseases and disorders mentioned herein and depending on the specific disease or disorder to be treated, the potency of the specific amino acid sequence, Nanobody and polypeptide of the invention to be used, the specific route of administration and the specific pharmaceutical formulation or composition used, the amino acid sequences, Nanobodies and polypeptides of the invention will generally be administered in an amount between 1 gram and 0.01 microgram per kg body weight per day, preferably between 0.1 gram and 0.1 microgram per kg body weight per day, such as about 1, 10, 100 or 1000 microgram per kg body weight per day, either continuously (e.g. by infusion), as a single daily dose or as multiple divided doses during the day. The clinician will generally be able to determine a suitable daily dose, depending on the factors mentioned herein. It will also be clear that in specific cases, the clinician may choose to deviate from these amounts, for example on the basis of the factors cited above and his expert judgment. Generally, some guidance on the amounts to be administered can be obtained from the amounts usually administered for comparable conventional antibodies or antibody fragments against the same target administered via essentially the same route, taking into account however differences in affinity/avidity, efficacy, biodistribution, half-life and similar factors well known to the skilled person.

[2433] Usually, in the above method, a single amino acid sequence, Nanobody or polypeptide of the invention will be used. It is however within the scope of the invention to use two or more amino acid sequences, Nanobodies and/or polypeptides of the invention in combination.

[2434] The Nanobodies, amino acid sequences and polypeptides of the invention may also be used in combination with one or more further pharmaceutically active compounds or principles, i.e. as a combined treatment regimen, which may or may not lead to a synergistic effect. Again, the clinician will be able to select such further compounds or principles, as well as a suitable combined treatment regimen, based on the factors cited above and his expert judgement.

[2435] In particular, the amino acid sequences, Nanobodies and polypeptides of the invention may be used in combination with other pharmaceutically active compounds or principles that are or can be used for the prevention and/or treatment of the diseases and disorders cited herein, as a result of which a synergistic effect may or may not be obtained. Examples of such compounds and principles, as well as routes, methods and pharmaceutical formulations or compositions for administering them will be clear to the clinician.

[2436] When two or more substances or principles are to be used as part of a combined treatment regimen, they can be administered via the same route of administration or via different routes of administration, at essentially the same time or at different times (e.g. essentially simultaneously, consecutively, or according to an alternating regime). When the substances or principles are to be administered simultaneously via the same route of administration, they may be administered as different pharmaceutical formulations or compositions or part of a combined pharmaceutical formulation or composition, as will be clear to the skilled person.

[2437] Also, when two or more active substances or principles are to be used as part of a combined treatment regimen, each of the substances or principles may be administered in the same amount and according to the same regimen as used when the compound or principle is used on its own, and such combined use may or may not lead to a synergistic effect. However, when the combined use of the two or more active substances or principles leads to a synergistic effect, it may also be possible to reduce the amount of one, more or all of the substances or principles to be administered, while still achieving the desired therapeutic action. This may for example be useful for avoiding, limiting or reducing any unwanted side-effects that are associated with the use of one or more of the substances or principles when they are used in their usual amounts, while still obtaining the desired pharmaceutical or therapeutic effect.

[2438] The effectiveness of the treatment regimen used according to the invention may be determined and/or followed in any manner known per se for the disease or disorder involved, as will be clear to the clinician. The clinician will also be able, where appropriate and on a case-by-case basis, to change or modify a particular treatment regimen, so as to achieve the desired therapeutic effect, to avoid, limit or reduce unwanted side-effects, and/or to achieve an appropriate balance between achieving the desired therapeutic effect on the one hand and avoiding, limiting or reducing undesired side effects on the other hand.

[2439] Generally, the treatment regimen will be followed until the desired therapeutic effect is achieved and/or for as long as the desired therapeutic effect is to be maintained. Again, this can be determined by the clinician.

[2440] In another aspect, the invention relates to the use of an amino acid sequence, Nanobody or polypeptide of the invention in the preparation of a pharmaceutical composition for prevention and/or treatment of at least one diseases and disorders associated with heterodimeric cytokines and their receptors; and/or for use in one or more of the methods of treatment mentioned herein.

[2441] The subject to be treated may be any warm-blooded animal, but is in particular a mammal, and more in particular a human being. As will be clear to the skilled person, the subject to be treated will in particular be a person suffering from, or at risk of, the diseases and disorders mentioned herein.

[2442] The invention also relates to the use of an amino acid sequence, Nanobody or polypeptide of the invention in the preparation of a pharmaceutical composition for the prevention and/or treatment of at least one disease or disorder that can be prevented and/or treated by administering an amino acid sequence, Nanobody or polypeptide of the invention to a patient.

[2443] More in particular, the invention relates to the use of an amino acid sequence, Nanobody or polypeptide of the invention in the preparation of a pharmaceutical composition for the prevention and/or treatment of diseases and disorders associated with heterodimeric cytokines and their receptors, and in particular for the prevention and treatment of one or more of the diseases and disorders listed herein.

[2444] Again, in such a pharmaceutical composition, the one or more amino acid sequences, Nanobodies or polypeptides of the invention may also be suitably combined with one or more other active principles, such as those mentioned herein.

[2445] Finally, although the use of the Nanobodies of the invention (as defined herein) and of the polypeptides of the invention is much preferred, it will be clear that on the basis of the description herein, the skilled person will also be able to design and/or generate, in an analogous manner, other amino acid sequences and in particular (single) domain antibodies against heterodimeric cytokines and/or their receptors, as well as polypeptides comprising such (single) domain antibodies.

[2446] For example, it will also be clear to the skilled person that it may be possible to “graft” one or more of the CDR's mentioned above for the Nanobodies of the invention onto such (single) domain antibodies or other protein scaffolds, including but not limited to human scaffolds or non-immunoglobulin scaffolds. Suitable scaffolds and techniques for such CDR grafting will be clear to the skilled person and are well known in the art, see for example U.S. Pat. No. 7,180,370, WO 01/27160, EP 0 605 522, EP 0 460 167, U.S. Pat. No. 7,054,297, Nicaise et al., Protein Science (2004), 13:1882-1891; Ewert et al., Methods, October 2004; 34(2):184-199; Kettleborough et al., Protein Eng. October 1991; 4(7): 773-783; O'Brien and Jones, Methods Mol. Biol. 2003: 207: 81-100; Skerra, J. Mol. Recognit. 2000: 13: 167-187, and Saerens et al., J. Mol. Biol. Sep. 23, 2005; 352(3):597-607, and the further references cited therein. For example, techniques known per se for grafting mouse or rat CDR's onto human frameworks and scaffolds can be used in an analogous manner to provide chimeric proteins comprising one or more of the CDR's of the Nanobodies of the invention and one or more human framework regions or sequences.

[2447] It should also be noted that, when the Nanobodies of the inventions contain one or more other CDR sequences than the preferred CDR sequences mentioned above, these CDR sequences can be obtained in any manner known per se, for example from Nanobodies (preferred), V_{H} domains from conventional antibodies (and in particular from human antibodies), heavy chain antibodies, conventional 4-chain antibodies (such as conventional human 4-chain antibodies) or other immuno globulin sequences directed against heterodimeric cytokines and/or their receptors. Such immunoglobulin sequences directed against heterodimeric cytokines and/or their receptors can be generated in any manner known per se, as will be clear to the skilled person, i.e. by immunization with heterodimeric cytokines and/or their receptors or by screening a suitable library of immunoglobulin sequences with heterodimeric cytokines and/or their receptors, or any suitable combination thereof. Optionally, this may be followed by techniques such as random or site-directed mutagenesis and/or other techniques for affinity maturation known per se. Suitable techniques for generating such immunoglobulin sequences will be clear to the skilled person, and for example include the screening techniques reviewed by Hoogenboom, Nature Biotechnology, 23, 9, 1105-1116 (2005) Other techniques for generating immunoglobulins against a specified target include for example the Nanoclone technology (as for example described in the published US patent application 2006-0211088), so-called SLAM technology (as for example described in the European patent application 0 542 810), the use of transgenic mice expressing human immunoglobulins or the well-known hybridoma techniques (see for example Larrick et al, Biotechnology, Vol. 7, 1989, p. 934). All these techniques can be used to generate immunoglobulins against heterodimeric cytokines and/or their receptors, and the CDR's of such immunoglobulins can be used in the Nanobodies of the invention, i.e. as outlined above. For example, the sequence of such a CDR can be determined, synthesized and/or isolated, and inserted into the sequence of a Nanobody of the invention (e.g. so as to replace the corresponding native CDR), all using techniques known per se such as those described herein, or Nanobodies of the invention containing such CDR's (or nucleic acids encoding the same) can be synthesized de novo, again using the techniques mentioned herein.

[2448] Further uses of the amino acid sequences, Nanobodies, polypeptides, nucleic acids, genetic constructs and hosts and host cells of the invention will be clear to the skilled person based on the disclosure herein. For example, and without limitation, the amino acid sequences of the invention can be linked to a suitable carrier or solid support so as to provide a medium than can be used in a manner known per se to purify heterodimeric cytokines and/or their receptors from compositions and preparations comprising the same. Derivatives of the amino acid sequences of the invention that comprise a suitable detectable label can also be used as markers to determine (qualitatively or quantitatively) the presence of heterodimeric cytokines and/or their receptors in a composition or preparation or as a marker to selectively detect the presence of heterodimeric cytokines and/or their receptors on the surface of a cell or tissue (for example, in combination with suitable cell sorting techniques).

[2449] The invention will now be further described by means of the following non-limiting Examples and Figures, in which the Figures show:

[2450] FIG. 1: Representative result of a competitive binding ELISA showing the IL23 neutralizing activity of nanobodies (in periplasm fraction) for IL12Rbeta1 chain or IL23R chain binding as described in Example 5. The average bound receptor is set to 1. Nanobodies selected as in Example 3b.

[2451] FIG. 2: Results of the cell-based proliferation assay described in Example 6.

[2452] FIG. 3: Full Biacore analysis for p19+ Nbs 121A2, 119A3; for the p40− Nbs 80D10, 80C10, for the p40+ Nbs, 81E10 and 121C1

[2453] FIG. 4: Biacore off-rates for selected monovalent Nbs plus cross-reactivity and epitope “grouping” data. Biacore off-rates on hIL-23 from R&D systems, or from eBiosciences were determined for a panel of p19+ and p19− Nanobodies as well as one p40− Nb and data are indicated in table 2.

[2454] FIG. 5: Results of an alpha-screen measuring hIL-23 binding to hIL23R-Fc (set up shown in FIG. 5B) for determining the potency of biparatopic nanobodies compared to the monovalent p19+ nanobodies. FIG. 5A is a graphic representation of the results. See also FIGS. 6 and 7.

[2455] FIG. 6: potencies of monovalent and biparatopic Nanobodies in the hIL-23-hIL-23R alpha-screen.

[2456] FIG. 7: potencies of monovalent and biparatopic Nanobodies in the hIL-23-hIL-23R alpha-screen

[2457] FIG. 8: Splenocyte bioassay results (measuring mIL-17 levels) for a selection of monovalent and biparatopic Nanobodies (p19+-35GS-p19−; and p19+-35GS-p40−)

[2458] FIG. 9: Biacore data with selected p19− (non-neutralizing) and p19+ (neutralizing) Nanobodies

[2459] FIG. 10: Biacore data with selected p40− (non-neutralizing) and p40+ (neutralizing) Nanobodies

[2460] FIG. 11: table showing the framework regions and CDR's of some preferred, but non-limiting “p19+ sequences” (in casu, p19+ Nanobodies)

[2461] FIG. 12: table showing the framework regions and CDR's of some preferred, but non-limiting “p19-sequences” (in casu, p19− Nanobodies)

[2462] FIG. 13: table showing the framework regions and CDR's of some preferred, but non-limiting “p40− sequences” (in casu, p40− Nanobodies) (*)

[2463] FIG. 14: table showing the framework regions and CDR's of some preferred, but non-limiting “p40+ sequences” (in casu, p40+ Nanobodies) (*)

[2464] FIG. 15: table showing the framework regions and CDR's of some preferred, but non-limiting “p35 sequences” (in casu, anti p35 Nanobodies)

[2465] FIG. 16: table showing the framework regions and CDR's of some preferred, but non-limiting “IL-27 sequences” (in casu, anti IL-27 Nanobodies)

[2466] FIG. 17: table showing the framework regions and CDR's of some preferred, but non-limiting “IL-12Rb1 sequences” (in casu, anti IL-12Rb1 Nanobodies)

[2467] FIG. 18: table showing the framework regions and CDR's of some preferred, but non-limiting “IL-12Rb2 sequences” (in casu, anti IL-12Rb2 Nanobodies)

[2468] FIG. 19: table showing the framework regions and CDR's of some preferred, but non-limiting “IL-23R sequences” (in casu, anti IL-23R Nanobodies)

[2469] FIG. 20: table giving the amino acid sequences of of some preferred, but non-limiting “p19+ sequences” (in casu, p19+ Nanobodies)

[2470] FIG. 21: table giving the amino acid sequences of of some preferred, but non-limiting “p19− sequences” (in casu, p19− Nanobodies)

[2471] FIG. 22: table giving the amino acid sequences of of some preferred, but non-limiting “p40− sequences” (in casu, p40− Nanobodies).(*)

[2472] FIG. 23: table giving the amino acid sequences of of some preferred, but non-limiting “p40+ sequences” (in casu, p40+ Nanobodies)(*)

[2473] FIG. 24: table giving the amino acid sequences of of some preferred, but non-limiting “p35 sequences” (in casu, anti p35 Nanobodies)

[2474] FIG. 25: table giving the amino acid sequences of of some “p19+ sequences” (in casu, p19+ Nanobodies) against mouse p19

[2475] FIG. 26: table giving the amino acid sequences of of some preferred, but non-limiting “IL-27 sequences” (in casu, anti IL-27 Nanobodies)

[2476] FIG. 27: table giving the amino acid sequences of of some preferred, but non-limiting “IL-12Rb1 sequences” (in casu, anti IL-12Rb1 Nanobodies)

[2477] FIG. 28: table giving the amino acid sequences of of some preferred, but non-limiting “IL-12Rb2 sequences” (in casu, anti IL-12Rb2 Nanobodies)

[2478] FIG. 29: table giving the amino acid sequences of of some preferred, but non-limiting “IL-23R sequences” (in casu, anti IL-23R Nanobodies)

[2479] FIG. 30: table giving the amino acid sequences of some preferred, but non-limiting examples of multivalent, multispecific and/or biparatopic contructs comprising at least one anti p19 sequence (i.e. a p19+ or p19− sequence, or both)

[2480] FIG. 31: table giving the amino acid sequences of some preferred, but non-limiting examples of humanised and/or mutated anti p19 sequences

[2481] FIG. 32: table giving the amino acid sequences of some preferred, but non-limiting examples of multivalent, multispecific and biparatopic contructs comprising at least one humanized anti p19 sequence (i.e. a p19+ or p19− sequence, or both)

[2482] FIG. 33: table giving the amino acid sequences of some preferred, but non-limiting examples of multispecific “p19-p40” contructs (i.e. comprising at least one anti p19 sequence and at least one anti p40 sequence)

[2483] FIG. 34: table giving the amino acid sequences of some preferred, but non-limiting multivalent, multispecific and/or biparatopic p40 constructs

[2484] FIG. 35: table giving the amino acid sequences of some preferred, but non-limiting multivalent, multispecific and/or biparatopic p35 constructs

[2485] FIG. 36: table giving the amino acid sequences of some preferred, but non-limiting multispecific “p35-p40” constructs (i.e. comprising at least one anti p35 sequence and at least one anti p40 sequence)

[2486] FIG. 37: graph showing the results obtained in Example 22 for the measurement of the potency of some anti p19 and anti p40 sequences in alpha-screen using hIL-23

[2487] FIG. 38: graph showing the results obtained in Example 22 for the measurement of the potency of some anti p19 and anti p40 sequences in Alphascreen using cyno IL-23

[2488] FIG. 39: graph showing the results of epitope mapping as obtained in Example 24

[2489] FIG. 40: graph showing the results of epitope mapping as obtained in Example 24

[2490] FIG. 41: graph showing the results obtained in Example 25 for the measurement of the mIL-22 synthesis in a mouse splenocyte assay after stimulation with hIL-23, which can be blocked by monovalent anti p40 nanobodies

[2491] FIG. 42: graph showing the results obtained in Example 25 for the measurement of the mIL-22 synthesis in a mouse splenocyte assay after stimulation cynomolgus IL-23, which can be blocked by monovalent anti p19 nanobodies.

[2492] FIG. 43 shows the results of flow cytometric analyis of h-IL12Rβ1 expressing Ba/F3 subclone 4D9, as obtained in Example 26. Detection was performed by a mouse-anti-hIL-12Rβ1 antibody followed by a PE-labeled polyclonal anti-mouse Ig antibody. The presence of h-IL12Rβ1 on the cells was measured by an increase in fluorescence intensity as compared to cells that were incubated with FACS buffer (PBS+10% FBS) followed by PE-labeled polyclonal anti-mouse Ig antibody. Fluorescence intensity is plotted on the X-axis, the number of events on the Y-axis. The FACS profile of unstained cells is also shown.

[2493] FIG. 44: graph showing the results obtained in Example 26 for hIL-23 responsiveness of several Ba/F3-hIL12Rβ1-hIL23R single cell clones, in a cell proliferation assay after a 72 hour incubation with several concentrations hIL-23, as a readout using [methyl-3H]-thymidine incorporation [ON pulse]

[2494] FIG. 45: graph showing the results obtained in Example 34 for the inhibition of the hIL-23 interaction with hIL-23R by monovalent (p19+: 119A3, 37D5-ALB1; p19−: 81A12, 81G2) Nanobodies.

[2495] FIG. 46: graph showing the results obtained in Example 34 for the inhibition of the IL-23 interaction with IL-23R by biparatopic (230049, 23IL0041, 23IL0038) Nanobodies

[2496] FIG. 47: graph showing the results obtained in Example 35 for determination of the optimal frequency of injections of hIL-23 to obtain optimal mIL-22 synthesis. mIL22 was measured in a mouse splenocyte assay upon administration of 1×3 microgram, 2×3 microgram or ×3 microgram hIL-23 (first part of the graph). In the second part of the graph the inhibition of mIL22 production is monitored when P23IL0036 is injected 2 hours before or 29 hours after the first hIL-23 injections. Average mIL-22 synthesis is expressed as % change compared to group 4.

[2497] FIG. 48: graph showing the results obtained in Example 35 for the inhibition of the mIL-22 synthesis in a mouse splenocyte assay upon administration of 23IL0036 or IRR007 via different routes of administration. Average mIL-22 synthesis is expressed as % change compared to the group which received hlL-23 only.

[2498] FIG. 49A to D: graphs showing the results obtained in Example 36 for the inhibition of the mIL-22 synthesis in a mouse splenocyte assay upon administration of Nanobodies (FIG. 49A: 23IL0049; FIG. 49B: 23IL0041; FIG. 49C: 23IL0038) or positive control antibody (FIG. 49D: BM01). Average mIL-22 synthesis is expressed as % change compared to the group which received hIL-23 only.

[2499] FIG. 50: graph showing the results obtained in Example 37 for the inhibition of the mIL-22 synthesis in a mouse splenocyte assay upon administration of 23IL0054 and 23IL0050. Average mIL-22 synthesis is expressed as % change compared to the group which received hIL-23 only.

[2500] FIG. 51A to E: sequence alignment of humanized amino acid sequences of the invention and the corresponding wild-type sequence and the VH3-23/JH5 germline sequences. Amino acid differences in the framework regions between the wild-type nanobody and the human germline sequence are indicated in black boxes, the CDR regions are highlighted in grey. The black boxes in the humanized sequences indicate the residues that were changed compared to the wild-type sequence. FIG. 51A: Alignment of P23IL119A3 and the final humanization variant with VH3-23/JH5 germline sequences. FIG. 51B: Alignment of P23IL81A12 and the final humanization variant with VH3-23/JH5 germline sequences. FIG. 51C: Alignment of P23IL81G2 and the final humanization variant with VH3-23/JH5 germline sequences. FIG. 51D: Alignment of P23IL37D5 and humanization variants with VH3-23/JH5 germline sequences. FIG. 51E: Alignment of P23IL124C4 and humanization variants with VH3-23/JH5 germline sequences.

[2501] FIG. 52: graph showing the results obtained in Example 40 for the inhibition of the IL-23 interaction with IL-23R by formatted humanized Nanobodies.

[2502] FIG. 53: graph showing the results obtained in Example 40 for the binding of 23IL0064 to human serum albumin.

[2503] FIG. 54: graph showing the results obtained in Example 41 for the inhibition of mIL-22 synthesis upon administration of Nanobodies or positive control antibody. Average mIL-22 synthesis is expressed as % change compared to the group which received hIL-23 only.

[2504] FIG. 55: graph showing the results obtained in Example 41 for the inhibition of mIL-22 synthesis upon administration of Nanobodies or positive control antibody. Average mIL-22 synthesis is expressed as % change compared to the group which received hIL-23 only.

[2505] FIG. 56: graph showing the results obtained in Example 47 for the inhibition of the mIL-22 synthesis in a mouse splenocyte assay upon administration of BM01, 23IL400 and 23IL403 at two different dose levels. Average mIL-22 synthesis is expressed as % change compared to the group which received hIL-23 only.

[2506] (*) Note: P23ILp40-PMP84G12 is a partial blocker of p40 and is therefore mentioned in both FIGS. 13 and 14, as well as FIGS. 22 and 23.

### EXPERIMENTAL PART

### Example 1

### Immunizations

[2507] Two llamas were immunized according to standard protocols with 6 boosts of a cytokine cocktail (2×40 ug+4×20 ug, containing equal amount of human IL12, IL23 and IL27). Blood and lymph nodes were collected from these animals after 7 days after boost 6 and 10 days after boost 6. All 3 cytokines were recombinant proteins purchased from R&D systems: hIL-12 (Cat. No 219-IL/CF); hIL-23 (Cat. No 1290-IL/CF) and hIL-27 (Cat. No 2526-IL/CF)

### Example 2

### Library Construction

[2508] Peripheral blood mononuclear cells were prepared from blood samples using Ficoll-Hypaque according to the manufacturer's instructions. Next, total RNA extracted was extracted from these cells as well as from the lymph node bow cells and used as starting material for RT-PCR to amplify Nanobody encoding gene fragments. These fragments were cloned into phagemid vector pAX50. Phage was prepared according to standard methods (see for example the prior art and applications filed by applicant cited herein) and stored at 4° C. for further use, resulting in two phage libraries (“A” and “B”).

### Example 3a

### Selections

[2509] To identify nanobodies recognizing the cytokines, the phage libraries from Example 2 were used for selections on the immunized cytokines and biotinylated cytokines. The (biotinylated) proteins were immobilized independently at 5 microg/ml, 0.5 ug/ml or 0 ug/ml (control) on Nunc Maxisorp ELISA plates previously coated with Neutravidine (5 ug/ml) when biotinylated proteins were used for selection. Bound phages were eluted from the IL12, IL23 or IL27 (and the biotinylated form) using trypsin (1 mg/ml) as in standard protocols.

[2510] Outputs of both R1 selections were analyzed for enrichment factor (phage present in eluate relative to controls). Based on these parameters the best selections were chosen for further analysis. The polyclonal output was then recloned in PAX51 and individual TG1 colonies were picked and grown in 96 deep well plates (1 ml volume) and induced by adding IPTG for nanobody expression. Periplasmic extracts (volume: ˜100 ul) were prepared according to standard methods (see for example the prior art and applications filed by applicant cited herein).

### Example 3b

### Selections of hIL12 or hIL23 Specific Nanobodies

[2511] To identify nanobodies specifically recognizing hIL12 or hIL23 and therefore recognizing IL12p35 or IL23p19 respectively, 2 rounds of selections with relevant counterselection were performed.

[2512] For IL23 specific nanobodies, 2.5 ug/ml IL23 was coated on Nunc Maxisorp ELISA plates. Phages from libraries 146 and 147 were added to the coated wells in the presence of 10 ug IL12 (100 ug/ml). The presence of IL12 prevents the phages recognizing non specific IL23 epitops (on IL12p40) to binds IL23. To identify IL12 specific nanobodies, the same was done with 2.5 ug/ml IL12 coated and 10 ug IL23 (100 ug/ml) added with the phages. In all cases, bound phages were eluted (R1) using trypsin (1 mg/ml) using standard protocols.

[2513] The phages eluted in the first round were used to do a second round using the same condition as in the first round, giving R2.

[2514] Output of R2 selections were rescued, cloned in PAX51 using standard polyclonal recloning. Individual colonies containing PAX51-expressing nanobodies were picked and grown in 96 deep well plates (1 ml volume) and induced by adding IPTG for nanobody expression. Periplasmic extracts (volume: ˜100 ul) were prepared according to standard methods (see for example the prior art and applications filed by applicant cited herein).

### Example 3c

### Selections of Mouse IL12 or Mouse IL23 Specific Nanobodies

[2515] In order to complete animal studies, it is desirable to have nanobodies recognizing the mouse cytokines isoforms. To identify nanobodies crossreacting with the mouse IL12 or mouse IL23, one approach is to test the nanobodies identified earlier against human IL12/IL23 for cross-reactivity with mouse IL12 or IL23. Several cross reacting nanobodies were identified that way.

[2516] A second approach is to select phages directly from the library of Example 2 directed against human IL12 and Il123. Therefore, the selection was done as in Example 3a except that mouse IL12 (5 ug/ml in 100 ul; cat. 419-ML/CF, R&Dsystem) or mouse IL23 (5 ug/ml in 100 ul; cat. 1887-MF/CF, R&Dsystem) was coated. In addition, the same selection was done in the presenece of mouse IL12 (when IL23 was coated) and humanIL23 (when IL12 was coated) as counterselection.

[2517] A third approach is to select phages directly from the phage eluted during the R1 as in Example 3b (the approach is then 1 round against humanILs with counterselection and a second round against mouseILs). Therefore, the second round of selection was done as in Example 3b except mouse IL12 (5 ug/ml in 100 ul; cat. 419-ML/CF, R&Dsystem) or mouse IL23 (5 ug/ml in 100 ul; cat. 1887-MF/CF, R&Dsystem) was coated. In parallel, to identify specific mouse IL12 and mouse IL23, the same was done with the presence of mouse IL12 (when IL23 was coated) and human IL23 (when IL12 was coated) to act as counterselective protein.

[2518] In all selections, bound phages were eluted using trypsin and resued in TG1. Individual TG1 colonies were picked and grown in 96 deep well plates (1 ml volume) and induced by adding IPTG for nanobody expression. Periplasmic extracts (volume: ˜100 ul) were prepared according to standard methods (see for example the prior art and applications filed by applicant cited herein).

### Example 4

### Screening for Binding

[2519] In order to determine binding specificity to the cytokines, the clones were tested in an ELISA binding assay setup.

[2520] In short, 1 ug/ml of cytokines (IL12, IL23 or IL27) was immobilized directly on polysorp microtiter plates (Nunc). Free binding sites were blocked using 4% Marvel in PBS. Next, 5 ul of periplasmic extract containing nanobody of the different clones in 100 ul 2% Marvel PBST were allowed to bind to the immobilized antigen. After incubation and washing, nanobody binding was revealed using a mouse-anti-myc secondary antibody, which was after a wash step detected with a HRP-conjugated goat-anti-mouse antibody. Binding specificity was determined based on OD values compared to controls having received no nanobody (as exemplified in Table B-1). Nanobodies binding to p40 were identified as nanobodies recognizing IL12 and IL23.

TABLE B-1
Percentage clones positive in ELISA (example for result
of selection as described in Example 3a). Total of
22 or 24 clones per target and per library.

| Target | IL12 | | IL23 | | IL27 | | Biot-IL12 | Biot-IL23 |
|---|---|---|---|---|---|---|---|---|
| LIB | A | B | A | B | A | B | B | B147 |
| % | 63 | 77 | 79 | 95 | 96 | 82 | 71 | 100 |

### Example 5

### Screening for Neutralizing Activity

[2521] In order to determine neutralizing efficiency of the nanobodies, the clones were tested in a receptor binding assay (Competitive ELISA). The cytokine were coated in 96 wells (Maxisorp, Nunc). After washing and blocking as usual, the coated cytokine was incubated with 15 ul periplasmic fraction prepared from above. Finally, specific receptor chain fused to human Fc (recombinant protein purchased from R&D system) was added.

[2522] After washing, the presence of bound receptor was detected using anti-humanIgG-IMP antibody. In the case where a nanobody present in the periplasm neutralizes the cytokine (ie, compete for receptor binding), no bound receptor was detected. In all cases, the concentration of protein tested was used to get sub-optimal response (Table B-2 shows an example and FIG. 1 shows a representative result). For IL12, IL12Rbeta1 or Il12Rbeta2 was used. For IL23, IL12Rbeta1 or IL23R was used.

[2523] For IL27, IL27R was used.

TABLE B-2
Percentage of positive clones in ELISA and percent of
clones competiting for IL23R binding in a competitive
ELISA (example of result from selection as described
in Example 3b). Total of 46-47 clones per library.

| | |
|---|---|
| Target | IL23 (1.5 ug/ml) |

| LIB | A | B |
|---|---|---|
| % binding (ELISA) | 44 | 94 |
| % competing IL23R binding | 25 | 40 |
| (competitive ELISA) | | |
| % competing IL12Rbeta1 | 2 | 11 |
| binding (competitive ELISA) | | |

### Example 6

### Neutralizing Activity in Cell Based Assays

[2524] Based on the results from Example 4 and/or based on their sequence (families of nanobodies present only in IL12 selections and not found in IL23 selection, for example, suggested that this families were specific for IL12), some nanobodies were selected to test their neutralizing activity on cells.

[2525] Those selected nanobodies (encoded in a PAX51 plasmid) were produced in a bacterial culture (50 ml) using standard IPTG induction and purified using TALON beads as recommended by the manufacturer (eluted from the beads using imidazole and dialysed against sterile PBS).

[2526] To test the nanobodies against IL12, PBMC activated for 3 days with PHA+1 day with IL-2 were used. Then we added IL-12 (in the presence of a range of anti-IL-12 nanobodies). After 2 days, the proliferation was measured with 3H-thymidine incorporation.

[2527] Using this setup, the maximum of proliferation was obtained with 60 pg/well (=300 pg/ml) of rhIL-12. So the purified nanobodies (concentration varied from 1 μg to 10-6 μg/well) were tested against 60 pg/well of IL-12. The antibodies LG120C7 and 120F8 were tested against commercially available antibody (anti-p35 and anti-p40, MAB219 and MAB1510 respectively were from R&D system; B-T21 was from Diaclone). The results are shown in FIG. 2.

### Example 7

### Immunization

[2528] 2 Llamas were immunized with a cocktail of (2×40 ug each+4×20 ug each): human IL12Rbeta1-hFc (Cat. No 839-B1/CF); human IL12Rbeta2-hFc (Cat. No 1959-B2-b1/CF) and human IL23R (Cat. No 1400-IR/CF). Immunizations were performed essentially as described in Example 1.

### Example 8

### Library Construction

[2529] Construction of libraries (“C” and “D”) was performed essentially as described in Example 2.

### Example 9a

### Selections of Nanobodies Against IL12-Family Receptors

[2530] To identify nanobodies recognizing the receptor of the IL12-family cytokines, phages from two libraries (“C” and “D”) were used for selections on the immunized recombinant proteins. The proteins were immobilized independently at 5 microg/ml, 0.5 microg/ml or 0 microg/ml (control) on Nunc Maxisorp ELISA plates.

[2531] To get rid of phages binding to the Fc fusion domain fused to the recombinant protein, total human IgG (250 microg/ml from sigma) and non-relevant hFc fusion protein (hRAGE-Fc, at 25 microg/ml from R&D System) was added to the phages during the time of selection.

[2532] Bound phages were eluted from the coated proteins using trypsine (1 mg/ml) as in standard protocols.

### Example 9b

### Selections of Nanobodies Neutralizing IL12-Family Receptors

[2533] This was performed as described in Example 9a, except that only 0.5 ug/ml of receptor was coated and that a competitive elution was performed instead of trypsin elution. For this, after binding of the phages and extensive washing, the ligands of the respective receptor chains were was used to elute the phages. In short, 5 ug of IL12 (for IL12Rbeta1 and IL12Rbeta2) or 5 ug of IL23 (for IL12Rbeta1 or IL23R) was added to the phages still bound to the coated receptors. After 2 h shacking, the eluted phages were recovered and rescued in TG1.

[2534] Outputs of both R1 selections were analyzed for enrichment factor (phage present in eluate relative to controls). Based on these parameters the best selections were chosen for further analysis. The polyclonal output was then recloned in PAX51 (for trypsin elution only) and individual TG1 colonies were picked and grown in 96 deep well plates (1 ml volume) and induced by adding IPTG for nanobody expression. Periplasmic extracts (volume: ˜100 ul) were prepared according to standard methods (see for example the prior art and applications filed by applicant cited herein).

### Example 10

### Screening for Binding

[2535] In order to determine binding specificity to the receptor chains, the clones were tested in an ELISA binding assay setup.

[2536] 2 ug/ml of protein (IL12Rb1, IL12Rb2 and IL23R) or total hIgG (15 ug/ml) was immobilized directly on maxisorp microtiter plates (Nunc). Free binding sites were blocked using 4% Marvel in PBS. Next, 7.5 ul of periplasmic extract containing nanobody of the different clones in 100 ul 2% Marvel PBST were allowed to bind to the immobilized antigen. After incubation and washing, nanobody binding was revealed using a mouse-anti-myc secondary antibody, which was after a wash step detected with an AP-conjugated goat-anti-mouse antibody. Binding specificity was determined based on OD values compared to controls having received no nanobody (as exemplified in FIG. 1) and compared to the hIgG coated wells (nanobodies binding to hIgG are binding to the Fc and not to the receptor chain). The results are shown on Table B-3:

TABLE B-3
Percentage of clones positive and specific for the receptors
in ELISA (example for result of selection as described in
3d). Total of 46 clones per target and per library tested.

| | | | |
|---|---|---|---|
| Target | IL12Rbeta1 | IL12Rbeta2 | IL23R |

| LIB | A | B | A | B | A | B |
|---|---|---|---|---|---|---|
| % | 83 | 41 | 70 | 15 | 83 | 89 |

### Example 11

### Screening for Neutralizing Activity

[2537] In order to determine neutralizing efficiency of the nanobodies, the clones were tested in a receptor binding assay (Competitive ELISA) the same way as previously done for IL12/IL23 and IL27. Shortly, the cytokine was coated in 96 wells (Maxisorp, Nunc). After washing and blocking as usual, the coated cytokine was incubated with 15 ul periplasmic fraction prepared from above. Finally, specific receptor chain fused to human Fc (recombinant protein purchased from R&D system) was added. After washing, the presence of bound receptor was detected using anti-human IgG-HRP antibody. In the case where a nanobody present in the periplasm neutralizes the cytokine (ie, compete for receptor binding), no receptor bound was detected. In all cases, the concentration of protein tested was use to get sub-optimal response. (See Table B-4 for data given as an example). For IL12, IL12Rbeta1 or Il12Rbeta2 was used. For IL23, IL12Rbeta1 or IL23R was used. For IL27, IL27R was used.

TABLE B-4
Number of nanobodies (in periplasm) blocking IL23
binding to IL12Rbeta1 in a competitive ELISA (example
of result from selection as described in 3d and
3e). Total of 46-47 clones per library.

| Target | IL12Rbeta1 | | | | IL23R | | | |
|---|---|---|---|---|---|---|---|---|
| Elution method | trypsine | | IL23 | | trypsine | | IL23 | |
| LIB | A | B | A | B | A | B | A | B |
| Nb clone | 2 | 1 | 15 | 8 | 3 | 4 | 12 | 8 |

### Example 12

### Biacore Analysis of IL-23 Monovalent p19+, p19−, and IL-23/IL-12 p40+, and p40− Nanobodies

[2538] hIL-23 (obtained from R&D systems) or hIL-12 (also obtained from R&D systems) was attached to Biacore chips and the binding characteristics of a selection of p19+, p40+ and p40− Nanobodies were determined. Results of the Biacore analysis for p19+ Nanobodies 121A2, 119A3, for the p40− Nanobodies 80D10, 80C10 and for the p40+ Nanobodies, 81E10 and 121C1 are shown in FIG. 3, which gives the results

[2539] Biacore

[2540] Cross-reactivity profiles (see FIG. 4) of the monovalent Nanobodies were studied in Biacore experiments (mIL-23) and in ELISAs using cynomolgus (cyno) IL-23 (supernantents from transfected cells) in which the Nanobodies to be tested were attached to plates, the cyno IL-23 was added and binding revealed using anti-p40 mAb (mAB 1510 R&D)

[2541] Epitope mapping experiments were performed using Bbiacore where monovalent nanobodies were attached to the chip and used to capture hIL-23. Subsequently the other monovalent nanobodies were tested for their capacity to bind. Nanobodies were considered to bind a separate epitope group when they could still bind hIL-23 already attached to the Nanobody fixed to the Biacore chip. Nanobodies that failed to bind were considered to belong to the same epitope group as the fixed Nanobody (results are also indicated in FIG. 4).

[2542] FIG. 4 shows Biacore off-rates for selected monovalent Nanobodies plus cross-reactivity and epitope “grouping” data. Biacore off-rates were determined using on hIL-23 from R&D systems (or from eBiosciences) for a panel of p19+ and p19− Nanobodies as well as one p40− Nanobody.

### Example 13

### Construction, Production and Purification of Bispecific/Biparatopic IL23 Nanobody Constructs

[2543] Biparatopic constructs were made in the pAX55 vector, with a p19+ nanobody (121A2 or 119A3) in the N-terminal position and a p19− nanobody (81G2, 81A12, 123F1, 119G7, 124C4 or 124H5) or a p40− nanobody (119B2) in the C-terminal position fused by a 35GS linker sequence. Additionally contracts were made with a p19− nanobody (81G2, 81A12, 123F1, 119G7, 124C4 or 124H5) in the N-terminal position and the p19+ nanobody 121A2 in the C-terminal position fused by a 35 GS linker. Similarly, the monovalent nanobodies were also cloned into pAX55 for use as controls.

[2544] The constructs were transformed in TG1 cells which were induced with 1 mM IPTG. Nanobodies were purified from the periplasmic extract using histidine trap affinity chromatography followed by desalting. LPS removal was performed by anion exhange chromatography at neutral pH, or by gel filtration in the presence of 50 mM octyl-glycosyl pyranoside, when additional purification was required

### Example 14

### Alpha-Screen Blockade of IL-23-IL23R Binding

[2545] An alpha-screen was performed in which the blocking of hIL-23 binding to hIL23R-Fc (see FIG. 5b) was monitored to determine the potency of biparatopic nanobodies compared to the monovalent p19+ nanobodies. Results are indicated in FIGS. 5A, 6 and 7.

[2546] FIG. 5 shows the results of an Alpha-screen measuring hIL-23 binding to hIL23R-Fc (see FIG. 5B) for determining the potency of biparatopic nanobodies compared to the monovalent p19+ nanobodies. FIG. 5A is a graphic representations of the results. FIGS. 6 and 7 show potencies of monovalent and biparatopic Nanobodies in the hIL-23-hIL-23R alpha-screen.

### Example 15

### Neutralization of IL-23 Biological Function by IL-23 Nanobodies

[2547] Freshly isolated mouse splenocytes were treated with hIL-23 (eBiosciences) preincubated with titrated hIL-23 nanobodies or control nanobodies or antibodies. After 3-7 days in culture, cell supernatants were removed and assayed by ELISA using IL-17 ELISA duo set (R&D systems). FIG. 8 shows results of a Splenocyte bioassay (measuring mIL-17 levels) for a selection of monovalent and biparatopic Nbs (p19+-35GS-p19−; and p19+-35GS-p40−). Reference is made to Aggarwal, Journal of Biological Chemistry, 278, 3, 2003, 1910-1914.

[2548] As shown in FIG. 8, monovalent p19+ Nbs inhibit hIL-23 mediated IL-17 production and most biparatopics show a considerable enhancement of potency.

### Example 16

### Immunizations

[2549] Two llamas were immunized according to standard protocols with 6 intramuscular injections at weekly intervals of recombinant human IL-23 (R&D Systems, Minneapolis, Minn., US) (two first injections at 40 μg/dose, 4 following injections at 20 μg/dose). Two weeks after the last injection a boost of 20 μg was given. The antigen was formulated in Stimune (Cedi-Diagnostics B.V., Lelystad, The Netherlands). At week 3, sera were collected to define antibody titers against human IL-23 by ELISA. 96-well Maxisorp plates (Nunc, Wiesbaden, Germany) were coated with human IL-23. After blocking and adding diluted sera samples, the presence of anti-IL-23 antibodies was demonstrated by using HRP (horseradish peroxidase) conjugated goat anti-llama immunoglobulin (Bethyl Laboratories Inc., Montgomery, Tex. USA) and a subsequent enzymatic reaction in the presence of the substrate TMB (3,3′,5,5′-tetramentylbenzidine) (Pierce, Rockford, Ill., USA). OD_{450 nm} exceeded 1 in both animals. Blood and lymph nodes were collected from these animals, blood 4 and 8 days after the last injection and lymph nodes 13 days after the boost.

### Example 17

### Library Construction

[2550] Peripheral blood mononuclear cells were prepared from blood samples using Ficoll-Hypaque according to the manufacturer's instructions. Next, total RNA was extracted from these cells as well as from the lymph node bow cells and used as starting material for RT-PCR to amplify Nanobody encoding gene fragments. These fragments were cloned into phagemid vector pAX50. Phage was prepared according to standard methods (see for example the prior art and applications filed by applicant cited herein) and stored at 4° C. for further use, resulting in two phage libraries (“E” and “F”).

### Example 18

### New Selections of Anti IL-23 p19 and p40 Nanobodies

[2551] To identify Nanobodies recognizing specifically the p19 subunit of human IL-23, 5 or 0.5 nM human IL-23 (R&D Systems, Minneapolis, Minn., US) was coated on Nunc Maxisorp ELISA plates. Phages from libraries E and F were predepleted 3 times by binding to wells coated with 5 μg/ml human IL-12 (to remove p40 binding phages) and further preincubated with 1 μM hIL-12 in solution before adding to the IL-23 coated wells. Phages were either specifically eluted with either 500 nM of a biparatopic anti-p19 Nanobody or 500 nM of recombinant IL-23R (R&D Systems, Minneapolis, Minn., US), or were eluted with trypsin as described in standard protocols. Outputs of these round 1 selections were analyzed for enrichment factor (number of phage present in eluate relative to controls). Based on this parameter the best outputs were chosen for a second selection round using the same conditions as round 1. Enriched outputs of these round 2 selections were screened in an ELISA for binding to hIL-23 versus hIL-12. Mostly specific binding to hIL-23 was observed. Individual TG1 colonies were picked and grown in 96 deep well plates (1 ml volume) and induced by adding IPTG for Nanobody expression. Periplasmic extracts (volume: ˜100 ul) were prepared according to standard methods (see for example the prior art and applications filed by applicant cited herein).

[2552] The p40 binding Nanobodies were obtained as described above, however bound phages were eluted using trypsin (1 mg/ml). Individual TG1 colonies from first round outputs were picked, grown and induced as described above. Clones were screened in an ELISA for binding to hIL-23 versus hIL-12. Clones binding to both hIL-23 and hIL-12 were selected for further characterization as p40 binders.

### Example 19

### Screening for p19 and p40 Binding Nanobodies and Identification of p19 and p40 Nanobodies Blocking Receptor Interaction

[2553] In order to determine binding specificity to the p19 or the p40 subunit of IL-23, the periplasmic extracts were tested in an ELISA binding assay setup. In this screen also periplasmic extracts derived from selections on libraries derived from llama's 146 and 147 were included.

[2554] 1 μg/ml of hIL-12 or hIL-23 was immobilized directly on polysorp microtiter plates (Nunc). Free binding sites were blocked using 1% casein in PBS. Next, periplasmic extracts containing Nanobody of the different clones were diluted 1/50 in 100 μl PBS+0.1% casein=0.05% tween and were allowed to bind to the immobilized antigen. After incubation and washing, Nanobody binding was revealed using a biotinylated anti-His antibody, which, after a wash step, was detected with HRP-conjugated extravidin and TMB substrate. Binding specificity was determined based on OD values compared to controls having received no Nanobody. Nanobodies binding to p40 were identified as Nanobodies recognizing hIL-12 and hIL-23, Nanobodies binding to p19 as the ones only recognizing hIL-23.

[2555] Cross-reactivity towards cynomolgus IL-23 was tested in an ELISA, where cynomolgus IL-23 was bound on the plate via an immobilized anti-IL-23 antibody (AF1716 R&D systems). Binding of the Nanobodies present in the extracts was revealed using HRP conjugated anti-myc antibodies and TMB substrate.

[2556] In order to determine neutralizing efficiency of the expressed Nanobodies, the periplasmic extracts were screened in a hIL-23 or hIL-12 alpha-screen assay. This assay relies on the use of Donor and Acceptor beads which can be conjugated to biological molecules. When a biological interaction between molecules brings the beads into proximity, excited singlet oxygen molecules that are produced upon laser excitation at 680 nm by a photosensitizer in the Donor bead, diffuse across to react with a chemiluininiscer in the acceptor bead that further activates fluorophores which subsequently emit light at 520-620 nm. If the Nanobody inhibits binding of hIL-23 to hIL-23R, or hIL-12 to hIL12Rbeta1 fluorescent output will decrease, and the amount of Nanobody present will be inversely related to the amount of fluorescence.

[2557] hIL-12 (R&D Systems) and hIL-23 (eBioscience) were biotinylated using Sulfo-NHS-LC-Biotin (Pierce). Human IL23R-Fc chimera and hIL12Rbeta1-Fc chimera (R&D Systems) were coupled to acceptor beads according to manufacturer instructions (Perkin Elmer, Waltham, Mass., US). To evaluate the neutralizing capacity of anti-p19 Nanobodies, dilution series of the periplasmic extracts were pre-incubated with biotinylated hIL-23. To this mixture, the IL-23R-Fc coupled acceptor beads and the streptavidin donor beads were added and further incubated for 1 hour at room temperature. Fluorescence was measured by reading plates on the EnVision Multilabel Plate Reader (Perkin Elmer) using an excitation wavelength of 680 nm and an emission wavelength of 520 nm. Decrease in fluorescence signal indicates that the binding of biotinylated hIL-23 to the IL-23 receptor is blocked by the Nanobody expressed in the periplasmic extract, the Nanobodies are designated 19+ when neutralizing and p19− when not neutralizing. The neutralizing capacity of anti-p40 Nanobodies was evaluated in the same way, but using biotinylated hIL-12 and hIL12Rbeta1-Fc coupled acceptor beads, with p40+ neutralizing Nanobodies and p40− non neutralizing Nanobodies.

### Example 20

### Biacore Off-Rate Screening of Periplasmic Extracts Containing Monovalent Anti-p19 and Anti p40 Monovalent Nanobodies

[2558] Human IL-23 (eBioscience) was covalently bound to CM5 sensor chips surface via amine coupling using EDC/NHS for activation and HCl for deactivation. Periplasmic extracts containing p19+, p19−, p40+ or p40− Nanobodies were injected for 4 minutes at a flow rate of 45 μl/min to allow binding to chip-bound antigen. Next, binding buffer without periplasmic extracts was sent over the chip at the same flow rate to allow spontaneous dissociation of bound Nanobody. From the sensorgrams obtained for the different periplasmic extract k_{off}-values (k₁) were calculated. (FIGS. 9 and 10). As a control hIL-12 (R&D systems) was immobilized on the Biacore chips, p19 Nanobodies did not bind to his chip, whereas the p40 Nanobodies bound and showed similar off rates as for hIL-23.

[2559] Based on this Biacore analysis, p19 and p40 Nanobodies with the best off rates were selected and sequenced. This provided, after sequencing analysis, 6 unique p19+ Nanobodies belonging to 4 families, 2 unique p19− Nanobodies belonging to 2 families, 6 unique p40+ sequences belonging to 5 families and 6 unique p40− sequences belonging to 6 families. Together with the sequences obtained in Examples 1 to 6, this makes a total of 7 families of p19+ Nanobodies, 15 families of p19− Nanobodies, 14 families of p40+ Nanobodies and 11 families of p40− Nanobodies. The amino acid sequences of these Nanobodies are listed in FIGS. 20 to 23, respectively.

[2560] The periplasmic extracts were also screened for cross-reactivity towards murine IL-23, by determining off rates on immobilized mIL-23. Two p19− families were cross-reactive towards mIL-23, no p19+, p40+ nor p40− mouse cross-reactive Nanobodies were retrieved.

### Example 21

### Anti IL-23 Nanobody Expression and Purification

[2561] Six p19+ Nanobodies from Example 20, one of the p19− Nanobodies from Example 20 and 12 of the p40+ Nanobodies from Example 20 and 8 of the p40− Nanobodies from Example 20 were expressed, purified and further characterised. Expression occurred in E. coli TG1 cells as c-myc, His6-tagged proteins in a culture volume of 250 mL. Expression was induced by addition of 1 mM IPTG and further incubation for 3 h at 37° C. After spinning down the cell cultures, periplasmic extracts were prepared by freeze-thawing the pellets and resuspension in dPBS. These extracts were used as starting material for immobilized metal affinity chromatography (IMAC) using Histrap FF crude columns (GE Healthcare). Nanobodies were eluted from the column with 250 mM imidazole and subsequently desalted towards dPBS. For the splenocyte assays described below, endotoxins should be removed from the Nanobodies and this was obtained by either gelfiltration in the presence of 50 mM Octylβ-D-glucopyranoside (OGP, Sigma) or by anion exchange (Mono Q HR5/50, GE healthcare) in dPBS, where the Nanobody is recovered in the flow through, whereas LPS is retained on the column. LPS levels are determined using a LAL-assay.

### Example 22

### Potency of Neutralizing Anti p19 and Anti p40 Nanobodies Determined in Alpha-Screen

[2562] hIL-12 (R&D Systems), hIL-23 (eBioscience) and cynomolgus IL-23 were biotinylated using Sulfo-NHS-LC-Biotin (Pierce). Human IL-23R-Fc chimera and hIL12Rbeta1-Fc chimera (R&D Systems, Minneapolis, Minn., US) were coupled to acceptor beads according to manufacturer instructions (Perkin Elmer, Waltham, Mass., US).

[2563] To determine potencies of the p19+ Nanobodies, a dilution series of anti-p19 Nanobodies starting from 250 nM up to 1 pM was pre-incubated with 500 pM biotinylated hIL-23 or cyno IL-23 during 15 minutes at room temperature (RT). To this mixture, the IL-23R acceptor beads and the streptavidin donor beads were added and further incubated for 1 hour at RT. Preincubation of all Nanobodies with biotinylated IL-23 reduced fluorescence intensity at 520 nm, demonstrating that the Nanobodies can effectively inhibit hIL-23 binding to IL-23R in a dose-dependent manner. The results are shown in FIG. 37, which is a graph showing the results obtained in this Example 22 for the measurement of the potency of some anti p19 and anti p40 Nanobodies in alpha-screen using hIL-23; and in FIG. 38, which is a graph showing the results obtained in this Example 22 for the measurement of the potency of some anti p19 and anti p40 Nanobodies in alpha-screen using cyno IL-23. The calculated IC50 values are shown in Table B-5, and vary from 7.3 nM for P23IL36A1 to 110 pM for P23IL37D5. However, cyno IL-23 binding is only effectively inhibited by P23IL36A4.

[2564] To determine potencies of the p40+ Nanobodies, a dilution series of anti-p40 Nanobodies starting from 250 nM up to 1 pM was pre-incubated with 3 nM biotinylated hIL-12 during 15 minutes at room temperature (RT). To this mixture, the IL12Rbeta1 acceptor beads and the streptavidin donor beads were added and further incubated for 1 hour at RT. Preincubation of most tested Nanobodies with biotinylated IL-12 reduced fluorescence intensity at 520 nm, demonstrating that the Nanobodies can effectively inhibit hIL-12 binding to IL12Rbeta1 in a dose-dependent manner. The calculated IC50 values are shown in Table B-6, and vary from 23 nM for P23IL81E10 up to 350 pM for P23IL3B8.

TABLE B-5
IC50 values for p19+ Nanobodies in alpha-screen for blocking
hIL-23 or cynomolgus IL-23 (cIL-23) receptor interaction

| P19+ Nanobody | IC50 (nM) hIL-23 | IC50 (nM) cIL-23 |
|---|---|---|
| P23IL 36A1 | 7.3 | 7.80 (partial blocking) |
| P23IL 36B3 | 2.2 | Not blocking |
| P23IL 36B4 | 1.8 | Not blocking |
| P23IL 36E5 | 0.96 | Partial blocking |
| P23IL 36A4 (=36G2) | 1.00 | 0.47 |
| P23IL 37D5 | 0.11 | 0.32 (partial blocking) |

TABLE B-6
IC50 values for p40+ Nanobodies in alpha-screen

| P40+ Nanobody | IC50 (nM) hIL-12 |
|---|---|
| P23IL 3B8 | 0.35 |
| P23IL 3G10 | 0.90 |
| P23IL 84A12 | 0.96 |
| P23IL 3F11 | not tested |
| P23IL 21C4 | 1.63 |
| P23IL 3C1 | 1.0 |
| P23IL 84G12 | partial blocking |
| P23IL 81E10 | 23 |
| P23IL 22D7 | 1.9 |
| P23IL 22E11 | 1.3 |
| P23IL 23H3 | 1.2 |
| P23IL 23E3 | 1.2 |

### Example 23

### Binding Kinetics of IL-23 Monovalent p19+, p19−, and IL-23/IL-12 p40+, and p40− Nanobodies

[2565] Binding kinetics of of a selection of p19+, p19−, p40+ and p40− Nanobodies were analysed by Surface Plasmon Resonance (Biacore T100). Human IL-23 was covalently bound to CM5 sensor chips surface via amine coupling using EDC/NHS for activation and HCl for deactivation. Nanobody binding was assessed at one concentration (100 nM). Each Nanobody was injected for 4 minutes at a flow rate of 45 μl/min to allow binding to chip-bound antigen. Next, binding buffer without Nanobody was sent over the chip at the same flow rate to allow spontaneous dissociation of bound Nanobody. From the sensorgrams obtained for the different Nanobodies I_{off}-values (k_{d}) were calculated and are indicated in Tables B-7 to B-11. For P23IL37D5, binding was assessed at various concentration, the association and dissociation rate constant (kₒₙ or k_{off}), and hence the binding constants (K_{D)} was determined and are shown in Table B-9.

[2566] Cross-reactivity profiles of the monovalent Nanobodies were studied in Biacore experiments using immobilized cynomolgus IL-23. Results are shown in Tables B-7 to B-11.

### Table B-7 to B-11: Off-Rates of the Anti p19 and p40 for Human and Cynomolgus IL-23 Determined on Biacore.

TABLE B-7

| P19+ Nanobody | koff (s−1) hIL-23 | koff (s−1) cyno IL-23 |
|---|---|---|
| P23IL 36A1 | 4.40E−02 | 7.70E−02 |
| P23IL 36E5 | 3.40E−04 | 4.00E−03 |
| P23IL 36A4 (=36G2) | 9.00E−04 | 1.20E−03 |
| P23IL 37D5 | 1.90E−04 | 5.10E−04 |

TABLE B-8

| P19− Nanobody | koff (s−1) hIL-23 | koff (s−1) cyno IL-23 |
|---|---|---|
| P23IL 20B11 | 1.3E−03/3E−04 | 1.6E−03/2.9E−04 |

TABLE B-9

| P19+ Nanobody | Koff (s−1) | Kon (s−1) | Kd (M) |
|---|---|---|---|
| P23IL 37D5 | 1.80E−04 | 3.20E+05 | 5.70E−10 |

TABLE B-10

| P40+ Nanobody | koff (s−1) hIL-23 | koff (s−1) cyno IL-23 |
|---|---|---|
| P23IL 3B8 | 3.50E−03 | >1.0E−02 à 7.7E−04 |
| P23IL 3G10 | 1.97E−03 | 2 à 4E−03 |
| P23IL 84A12 | 1.60E−03 | |
| P23IL 3F11 | 1.46E−03 | |
| P23IL 21C4 | 5.10E−04 | |
| P23IL 3C1 | 2.94E−04 | 5.9E−05 |
| P23IL 84G12 | 2.90E−04 | 7E−05 |
| P23IL 81E10 | 2.63E−03 | 1.32E−03/1.2E−03 |
| P23IL 22D7 | 1.70E−04 | 2.30E−04 |
| P23IL 22E11 | 2.30E−04 | 2.30E−04 |
| P23IL 23H3 | 1.10E−03 | 6.7E−04 |
| P23IL 23E3 | 1.80E−04 | 1.2 à 2.5E−03 |

TABLE B-11

| P40− Nanobody | koff (s−1) hIL-23 | koff (s−1) cyno IL-23 |
|---|---|---|
| P23IL 81A1 | 5.90E−04 | 1.20E−02 |
| P23IL 80D10 | 9.70E−05 | 1.05E−04/7.9E−05 |
| P23IL 84G1 | 2.00E−04 | 2.40E−03 |
| P23IL 119B2 | 1.52E−02 | |
| P23IL 22D10 | 1.00E−03 | 1.0E−04 |
| P23IL 20F2 | 5.4E−04 | |
| P23IL 23A11 | 1.10E−03 | |

### Example 24

### Epitope Grouping of Anti-p19 and Anti-p40 Nanobodies

[2568] In order to determine compatibility of Nanobodies to build into biparatopic or bispecific constructs, some relative epitope mapping experiments were conducted.

[2569] To determine relative epitopes of p19 Nanobodies, a given anti-p19 Nanobody was biotinylated using Sulfo-NHS-LC-Biotin (Pierce) and an anti human IL-23 antibody (R&D Mab6091) was coupled to acceptor beads according to manufacturer instructions (Perkin Elmer, Waltham, Mass., US). A dilution series of a second anti-p19 Nanobody starting from 200 nM up to 1 pM was pre-incubated with 500 pM hIL-23 during 15 minutes at RT. To this mixture, the anti IL-23 antibody coupled acceptor beads and the biotinylated p19 Nanobody is added and further incubated for 1 hour at RT, and finally the mixture is incubated with the streptavidin donor beads for 1 hour at RT. If preincubation of a given Nanobody with hIL-23 reduced fluorescence intensity at 520 nm, this Nanobody recognizes the same or an overlapping epitope on hIL-23 as the biotinylated Nanobody. The relative epitopes determined as such are shown in Table B-12.

[2570] Accordingly, further aspects of the invention are:
[2571] p19+ sequences (as defined herein, and in particular, (single) domain antibodies and/or Nanobodies) binding to the same epitope on p19 as P23IL-121A2 (SEQ ID NO:1890), P23IL119A3 (SEQ ID NO:1898) and/or P23IL36A4 (SEQ ID NO:2486), and/or capable of cross-blocking the binding of the same to p19, and/or capable of competing with the same for binding to p19;
[2572] p19− sequences (as defined herein, and in particular, (single) domain antibodies and/or Nanobodies) binding to the same epitope on p19 as P23IL81A12 (SEQ ID NO: 1936) and/or P23IL81G2 (SEQ ID NO:1930), and/or capable of cross-blocking the binding of the same to p19, and/or capable of competing with the same for binding to p19;
[2573] p19− sequences (as defined herein, and in particular, (single) domain antibodies and/or Nanobodies) binding to the same epitope on p19 as P23IL-124C4 (SEQ ID NO: and/or P23IL20B11 (SEQ ID NO:2502), or capable of cross-blocking the binding of the same to p19, and/or capable of competing with the same for binding to p19;
[2574] p19− sequences (as defined herein, and in particular, (single) domain antibodies and/or Nanobodies) binding to the same epitope on p19 as P23IL119G7 (SEQ ID NO:1902), and/or capable of cross-blocking the binding of the same to p19, and/or capable of competing with the same for binding to p19.

TABLE B-12
relative epitope grouping of p19 Nanobodies, X, A,
B, C correspond to separate epitopes; X/A is a separate
epitope where the Nanobody prevents binding of Nanobodies
recognizing epitope X or epitope A

| Nanobody type | ID | Epitope group |
|---|---|---|
| p19+ | P23IL-121A2 | X |
| | P23IL119A3 | X |
| | P23IL37D5 | X/A |
| | P23IL36A4 | X |
| p19− | P23IL81A12 | A |
| | P23IL81G2 | A |
| | P23IL-124C4 | B |
| | P23IL20B11 | B |
| | P23IL119G7 | C |

[2575] A similar experiment was conducted to determine relative epitopes of p40 Nanobodies. Acceptor beads were coupled to the p19+ Nanobody P23IL-121A2. In a first experiment the p40+Nanobodies P23IL3B8, 3C1, 81E10, 23E3, 23H3 and 3G10 and the p40− Nanobody P23IL80D10 were biotinylated. Not biotinylated Nanobodies P23IL3B8, 3C1, 23E3, 23H3, 3G10, 81E10, 80D10, 20F2, 22D10, 23A11, 80A3, 84G1, 81A1, 21C4, 22D7, 22E11, 84A12, 84G12 and 3F1 were preincubated at a concentration of 100 nM with 400 pM hIL-23 during 15 minutes at RT. To the Nanobody-hIL-23 mixture, the P23IL-121A2 coupled acceptor beads and a given biotinylated Nanobody is added and further incubated for 1 hour at RT, and finally the mixture is incubated with the streptavidin donor beads for 1 hour at RT. If preincubation of a given Nanobody with hIL-23 reduced fluorescence intensity at 520 nm, this Nanobody recognizes the same or an overlapping epitope on hIL-23 as the biotinylated Nanobody/mAB.

[2576] As expected all p40+ Nanobodies bind to different epitopes as the p40− Nanobodies. For the p40+ Nanobodies, the relative mapping is more complicated, but the results show that:
[2577] Of the Nanobodies shown in FIG. 23, Nanobodies P23IL23E3 (SEQ ID NO: 2514), 23H3 (SEQ ID NO:2515), 3G10 (SEQ ID NO: 2516), 21C4 (SEQ ID NO:2510), 22D7 (SEQ ID NO: 2511), 22E11 (SEQ ID NO:2512), 84A12 (SEQ ID NO: 1970) and 3F11 (SEQ ID NO: 2525) recognize at least part of the same epitope as P23IL3B8 (SEQ ID NO:2527). Accordingly, p40+ sequences (as defined herein, and in particular, (single) domain antibodies and/or Nanobodies) binding to the same epitope on p40 as P23IL3B8 (SEQ ID NO:2527), and/or capable of cross-blocking the binding of the same to p40, and/or capable of competing with the same for binding to p40, form a further aspect of the invention.
[2578] Nanobodies P23IL23E3 (SEQ ID NO: 2514), 23H3 (SEQ ID NO:2515), 81E10 (SEQ ID NO:1946), 80D10 (SEQ ID NO:1940), 20F2 (SEQ ID NO:2504), 22D10 (SEQ ID NO:2505), 80A3 (SEQ ID NO:1952), 84G1 (SEQ ID NO:1992), 81A1(SEQ ID NO:1962), 22D7 (SEQ ID NO:2511) and 84G12 (SEQ ID NO:1942) recognize at least part of the same epitope as P23IL3C1 (SEQ ID NO:2033). Accordingly, p40+ or p40− sequences (as defined herein, and in particular, (single) domain antibodies and/or Nanobodies) binding to the same epitope on p40 as P23IL3C1 (SEQ ID NO:2033), and/or capable of cross-blocking the binding of the same to p40, and/or capable of competing with the same for binding to p40, form a further aspect of the invention;
[2579] Nanobodies P23IL3B8 (SEQ ID NO:2527), 3C1 (SEQ ID NO:2033), 23H3 (SEQ ID NO: 2515), 3G10 (SEQ ID NO: 2516), 81E10 (SEQ ID NO: 1946), 80D10 (SEQ ID NO:1940), 80A3 (SEQ ID NO:1952), 21C4 (SEQ ID NO:2510), 22D7 (SEQ ID NO:2511), 22E11 (SEQ ID NO:2512), 84A12 (SEQ ID NO: 1970), 3F11 (SEQ ID NO: 2525) recognize at least part of the same epitope as P23IL-23E3 (SEQ ID NO: 2514). Accordingly, p40+ or p40− sequences (as defined herein, and in particular, (single) domain antibodies and/or Nanobodies) binding to the same epitope on p40 as P23IL-23E3 (SEQ ID NO: 2514), and/or capable of cross-blocking the binding of the same to p40, and/or capable of competing with the same for binding to p40, form further aspects of the invention;
[2580] Nanobodies P23IL 3B8 (SEQ ID NO:2527), 3C1 (SEQ ID NO:2033), 23E3 (SEQ ID NO: 2514), 3G10 (SEQ ID NO: 2516), 81E10 (SEQ ID NO:1946), 80A3 (SEQ ID NO:1952), 84G1 (SEQ ID NO:1992), 81A1 (SEQ ID NO:1962), 21C4 (SEQ ID NO:2510), 22D7 (SEQ ID NO:2511), 22E11 (SEQ ID NO:2512), 84A12 (SEQ ID NO: 1970), 84G12 (SEQ ID NO:1942), 3F11 (SEQ ID NO: 2525) recognize at least part of the same epitope as P23IL-23H3 (SEQ ID NO:2515). Accordingly, p40+ or p40− sequences (as defined herein, and in particular, (single) domain antibodies and/or Nanobodies) binding to the same epitope on p40 as P23IL-23H3 (SEQ ID NO:2515), and/or capable of cross-blocking the binding of the same to p40, and/or capable of competing with the same for binding to p40, form further aspects of the invention.
[2581] Nanobodies P23IL 3B8 (SEQ ID NO:2527), 23E3 (SEQ ID NO: 2514), 23H3 (SEQ ID NO: 2515), 81A1 (SEQ ID NO:1962), 21C4 (SEQ ID NO:2510), 22D7 (SEQ ID NO:2511), 22E11 (SEQ ID NO:2512), 84A12 (SEQ ID NO: 1970) and 3F11 (SEQ ID NO: 2525) recognize the same epitope as 23IL3G10 (SEQ ID NO: 2516).
[2582] Nanobodies P23IL 3C1 (SEQ ID NO:2033), 23E3 (SEQ ID NO:2514), 23H3 (SEQ ID NO: 2515), 80D10 (SEQ ID NO:1940), 22D10 (SEQ ID NO: 2505), 80A3 (SEQ ID NO:1952), 84G1 (SEQ ID NO:1992), 81A1 (SEQ ID NO: 1962) and 84G12 (SEQ ID NO: 1942) recognize the same epitope as P23IL81E10 (SEQ ID NO: 1946). Accordingly, p40+ or p40− sequences (as defined herein, and in particular, (single) domain antibodies and/or Nanobodies) binding to the same epitope on p40 as P23IL81E10 (SEQ ID NO: 1946), and/or capable of cross-blocking the binding of the same to p40, and/or capable of competing with the same for binding to p40, form further aspects of the invention.

[2583] In a second experiment the p40+ Nanobodies P23IL-22D7 (SEQ ID NO:2511) and 22E11 (SEQ ID NO:2512) were biotinylated. Non-biotinylated Nanobodies P23IL84G12, 80D10, 20F2, 22D10, 23A11, 80A3, 84G1, 81A1, 22D7 and 22E11 were preincubated at a concentration of 250 nM or 71 nM with 400 pM hIL-23 during 15 minutes at RT. To the Nanobody-hIL-23 mixture, the P23IL-121A2 coupled acceptor beads and biotinylated P23IL-22D7 or 22E11 is added and further incubated for 1 hour at RT, and finally the mixture is incubated with the streptavidin donor beads for 1 hour at RT. If preincubation of a given Nanobody with hIL-23 reduced fluorescence intensity at 520 rim, this Nanobody recognizes the same or an overlapping epitope on hIL-23 as the biotinylated Nanobody. The results are shown in FIGS. 39 (epitope mapping against 22D7) and 40 (epitope mapping against 22E11). Accordingly, p40+ or p40− sequences (as defined herein, and in particular, (single) domain antibodies and/or Nanobodies) binding to the same epitope on p40 as P23IL-22D7 (SEQ ID NO:2511), and/or capable of cross-blocking the binding of the same to p40, and/or capable of competing with the same for binding to p40, form further aspects of the invention. Similarly, Accordingly, p40+ or p40− sequences (as defined herein, and in particular, (single) domain antibodies and/or Nanobodies) binding to the same epitope on p40 as P23IL-22E11 (SEQ ID NO:2512), and/or capable of cross-blocking the binding of the same to p40, and/or capable of competing with the same for binding to p40, form further aspects of the invention.

[2584] Relative epitope mapping of the p19+ Nanobody P23IL119A3 versus the three p40+ Nanobodies P23IL3B8, P23IL3C1 and P23IL-23E3 was performed using biacore where P23IL119A3 was attached to the chip and used to capture hIL-23. Subsequently the p40+ monovalent Nanobodies were tested for their capacity to bind. As expected the p40+ Nanobodies bind to a separate epitope group since they could still bind hIL-23 already attached to P23IL119A3 fixed to the Biacore chip.

### Example 25

### Neutralizing Activity of p19+ and p40+ Nanobodies in Cell Based Assays

[2585] A mouse splenocyte assay (modified from Example 15) was used to determine inhibition of IL-23 activity based on the ability of IL-23 to stimulate IL-22 secretion from mouse spleen cells. The basic protocol is as follows: the spleens of 5 C57BL/6 mice are removed and the splenocytes are harvested and a single cell suspension is prepared. The splenocytes are washed 3 times in RPMI (Invitrogen, Cat 72400-021) supplemented with 10% FBS (Invitrogen, Cat 10270-106), 1% Pen/Strep (Invitrogen, Cat 15140-122), 80 μM β-mercapto-ethanol (Invitrogen, Cat 31350-010) and 1 mM SodiumPyruvate (Gibco, Cat 1136). This medium is further referred to as complete RPMI. The splenocyte suspension is treated with 1× erythrocyte lysis buffer (10× stock: 82.9 g NH4Cl, 10.9 g KHCO3 and 370 mg EDTA in 1 liter MilliQ) to remove all residual erythrocytes. After 3 wash steps in complete RPMI, the cells are filtered over a 100 μM cell strainer (BD, Cat 35260) and resuspended in complete RPMI containing 20 ng/ml recombinant mIL-2 (R&D systems, Cat 402-ML). Cells are seeded at 400 000 cells/well in 96-well flat bottom plates (Falcon, Cat 353072).

[2586] Nanobodies (50 μl) were pre-incubated with recombinant hIL-23 in complete RPMI for 30 minutes at room temperature and then incubated for another 5 days with the splenocytes, at a pre-determined final concentration of hIL-23 or cyno IL-23 (ranging from 3.7-19 pM). Supernatants were collected and levels of mIL-22 measured using ELISA (mouse IL-22 ELISA construction kit, Antigenix America, Cat RMF222CK).

[2587] As shown in FIGS. 41 and 42, monovalent p40+ (FIG. 41) and p19+ (FIG. 42) Nanobodies inhibit hIL-23 mediated IL-22 production. As control an anti-p40 mAB was used (referred to herein as “BM01”), which was a human mAB according to WO 00/56772 (with the variable chain sequences of SEQ ID NO's; 31 and 32 of WO 00/56772), which was prepared according to standard techniques.

[2588] Table B-13 shows the potencies for p19+ Nanobodies for blocking 19 pM hIL-23 and 3.7 pM cynomolgus IL-23 (cIL-23). Table B-14 shows the potencies for p40+ Nanobodies for blocking 19 pM hIL-23 and 3.7 pM cyno IL-23 (nc=blocking not complete).

TABLE B-13
potencies for p19+ Nanobodies for blocking
19 pM hIL-23 and 3.7 pM cynomolgus IL-23 (cIL-23).

| Nanobody | hIL-23 IC50 (pM) | cIL-23 IC50 (pM) |
|---|---|---|
| P23IL119A3 | 25510 | 37430 |
| BM01 | 8 | 25 |
| P23IL36A4 | 3120 | 10955 |
| P23IL37D5 | 17 | 288 |

TABLE B-14
potencies for p40+ Nanobodies for blocking 19 pM hIL-23 and
3.7 pM cyno IL-23 (nc = blocking not complete).

| Nanobody | hIL-23 IC50 (pM) | cIL-23 IC50 (pM) |
|---|---|---|
| BM01 | 15 | 40 |
| P23IL3B8 | 408 | 1787 |
| P23IL3C1 | nc 510 | nc 517 |
| P23IL3G10 | 2325 | 9451 |
| P23IL-23E3 | 935 | 5461 |
| P23IL-23H3 | 790 | 32540 |
| P23IL-22D7 | 116 | 705 |
| P23IL-22E11 | 186 | 1269 |

### Example 26

### Generation of a Ba/F3 Cell Line Stably Expressing hIL23R and hIL12Rβ1

[2589] Ba/F3, a murine IL-3 dependent pro-B cell line, was cultured in RPMI (Invitrogen, Cat 72400-021) supplemented with 10% FBS (Invitrogen, Cat 10270-106), 1% Pen/Strep (Invitrogen, Cat 15140-122) and 10% conditioned medium of WEHI-3B, a mouse myelomonocytic cell line, constitutively producing IL-3. At first, the BA/F3 cell line was stably transfected with an expression vector encoding hIL-12Rβ1. Transfection was performed using an Amaxa nucleofector II (Cat. No. AAD-1001) and the Amaxa nucleofection kit V (Cat. No. VCA-1003). Immediately after transfection, 500 μl pre-warmed culture medium is added to the cuvette and the entire content is transferred into a T25 containing 4 ml culture medium as described above. To select the transfected cells, 1.1 mg/ml Hygromycin B (Invitrogen, Cat 10687-010) was added 48 h after transfection.

[2590] The pool of hIL12Rβ1 expressing Ba/F3 cells was single-cell sorted using a FACSaria. Hereto, cells were resuspended in a 15 ml Falcon tube at 20E6/ml in diluted mouse-anti-hIL-12Rβ1 (0.5 mg/ml, R&D systems, Cat MAB839). The cells were counted using Trypan Blue and haematocytometer. All dilutions and wash steps are done with PBS 1× (Invitrogen: 141190-094) supplemented with 10% FBS. After 30 minutes incubation at 4° C., the cells are washed three times with PBS. A second staining is done with phycoerythrin-labeled anti-mouse IgG (Jackson ImmunoResearch Laboratories, Cat 115-115-164). The cells are incubated for 30 minutes at 4° C. and washed three times. A final stain with TOPRO3 (Molecular Probes T3605) is included to exclude dead cells. H-IL12Rβ1 expressing Ba/F3 cells were single-cell sorted into 96-well culture plates and further cultured.

[2591] After several screenings on FACSarray, h-IL12Rβ1 expressing Ba/F3 subclone 4D9 was selected for transfection with a hIL-23 encoding plasmid. The results of flow cytometric analysis of h-IL12Rβ1 expressing Ba/F3 subclone 4D9, as obtained in this Example 26 are shown in FIG. 43. Detection was performed by a mouse-anti-hIL-12Rβ1 antibody followed by a PE-labeled polyclonal anti-mouse Ig antibody. The presence of h-IL12Rβ1 on the cells was measured by an increase in fluorescence intensity as compared to cells that were incubated with FACS buffer (PBS+10% FBS) followed by PE-labeled polyclonal anti-mouse Ig antibody. Fluorescence intensity is plotted on the X-axis, the number of events on the Y-axis. The FACS profile of unstained cells is also shown.

[2592] For the stable transfection of the hIL12Rβ1 expressing Ba/F3 subclone 4D9 with hIL-23R, the same protocol as described above is used, with the only difference that 2 μg pcDNA3.1Neo-hIL23R instead of 2 μg pcDNA3.1Hygro-h-IL12Rβ1 is used. To select for stable transfected cells, 1 mg/ml G418 (Invitrogen, Cat 10131-07) was added 48 h after transfection. After culturing a few passages on G418 selection, the pool of Ba/F3-hIL12Rβ1-hIL23R cells was depleted of WEHI-3B culture supernatant (containing the mIL-3 growth factor) and supplemented with 100 ng/ml recombinant hIL-23 (e-Bioscience, Cat 34-8239-85). The surviving cells were expanded and seeded out at 3 cells/well, 1 cell/well or 0.3 cells/well in RPMI supplemented with 10% FBS, 1% P/S and 100 ng/ml recombinant hIL-23.

[2593] Obtained single cell clones are expanded and screened for their hIL-23 responsiveness in a cell proliferation assay. Hereto, selected cell clones are washed three times in RPMI supplemented with 10% FBS and 1% Pen/Strep and subsequently incubated for 3 hours in hIL-23-free medium at a cell density of 3E06-5E06 cells/ml. After starvation, the cells are seeded at 7500 cells/well in 96-well flat bottom plates (Greiner bio-one, Cat 655180) in a volume of 100 μl hIL-23-free medium. Next, 100 μl of a hIL-23 dilution curve is added to the cells in such a manner that a ½ serial dilution starting from 500 ng/ml is obtained. After 72 hours of incubation, the cells are pulsed with 1 μCi [³H]-thymidine and incubated for an additional 24 h prior to freezing at −80° C. Cells were subsequently thawed and embedded on glass fiber membranes using a cell harvester (Perkin Elmer Life Sciences, Wellesley, Mass., USA). After several washings with water, filters were air-dried and counted using a γ-counter (Perkin Elmer Life Sciences). The results are shown in FIG. 44, which is a graph showing the results obtained in this Example 26 for hIL-23 responsiveness of several Ba/F3-hIL12Rβ1-hIL23R single cell clones, in a cell proliferation assay after a 72 hour incubation with several concentrations hIL-23, as a readout using [methyl-3H]-thymidine incorporation [ON pulse]. Clone 5H10 was chosen for further characterization of IL-23 neutralizing Nanobody formats.

### Example 27

### IL-12 Dependent PHA Blast Proliferation Assay

[2594] PHA blasts were derived by culturing PBMC in PHA (50 μg/ml) during 3 days and IL-2 (50 U/ml) during one day. These PHA blasts were stimulated with 1 pM hIL-12 pre-incubated with a dilution series of a p40+ Nanobody starting starting from 2000 nM up to 1 pM or control Nanobodies or antibodies. Cells were stimulated for 2 days and pulsed with 1 μCi/well ³H-thymidine for the 6 last hours, hence proliferation was determined by measuring ³H-thymidine incorporation by scintillation counting.

[2595] As shown in Table B-15, most tested monovalent p40+ Nanobodies inhibit hIL-12 mediated proliferation.

TABLE B-15
potency of p40+ Nanobodies to block the hIL-12 mediated proliferation
using 1 pM hIL-12 (nc = no complete blocking).

| Nanobody | Input hIL-12 (pM) | IC 50 (pM) |
|---|---|---|
| BM01 | 1 | 0.67 |
| 3B8 (SEQ ID NO: 2527) | 1 | nc 1505 |
| 3C1 (SEQ ID NO: 2526) | 1 | hardly blocking |
| 3G10 (SEQ ID NO: 2516) | 1 | 194 |
| 23E3 (SEQ ID NO: 2514) | 1 | nc 1734 |
| 23H3 (SEQ ID NO: 2515) | 1 | 174 |
| 22D7 (SEQ ID NO: 2511) | 1 | 116 |
| 22E11 (SEQ ID NO: 2513) | 1 | 159 |

### Example 28

### Construction, Production and Purification of Additional Bispecific/Biparatopic IL-23 p19 Nanobodies in Order to Investigate the Effect of Linker Length on Potency

[2596] In addition to the biparatopic constructs described in Example 13, some biparatopic constructs were made with shorter linkers to determine the optimal linker length. The individual building blocks were fused by a 9 Gly/Ser (GGGGSGGGS; SEQ ID NO: 2649) or a 20 Gly/Ser linker (GGGGSGGGSGGGGSGGGGSGGGGSGGGGS; SEQ ID NO: 2650) and cloned in the the pAX100 vector. The sequences of these biparatopic anti-p19 Nanobodies are shown in FIG. 30. The constructs were transformed in TG1 cells which were induced with 1 mM IPTG. Nanobodies were purified from the periplasmic extract using histidine trap affinity chromatography followed by desalting. Further purification and LPS removal was performed by gel filtration in the presence of 50 mM Octylβ-D-glucopyranoside (Sigma). Potency was evaluated in the splenocyte assay (see Example 27) and IC50's are listed in Tables B-16 and B-17. Results clearly show that shortening the linker length worsens the IC50, so the use of a linker with more than 20 amino acid residues in total (such as between 20 amino acid residues and 45 amino acid residues, for example a 35 Gly/Ser linker (GGGGSGGGGSGGGGSGGGGSGGGGSGGGGSGGGGS, SEQ ID NO: 2651) may be preferred.

TABLE B-16
potencies in the splenocyte assay using 19 pM hIL-23

| Nanobody | hIL-23 IC50 (pM) |
|---|---|
| P23IL119A3-35GS-81G2 | 14 |
| P23IL119A3-9GS-81G2 | 1988 |
| P23IL-121A2-35GS-81G2 | 94 |
| P23IL-121A2-9GS-81G2 | 740 |

TABLE B-17
potencies in the splenocyte assay using 37 pM hIL-23

| Nanobody | hIL-23 IC50 (pM) |
|---|---|
| P23IL-121A2-35GS-124C4 | 57 |
| P23IL-121A2-20GS-124C4 | 1360 |
| P23IL-121A2-9GS-124C4 | 1715 |
| P23IL-121A2-35GS-119G7 | 42 |
| P23IL-121A2-9GS-119G7 | 4755 |

### Example 29

### Construction, Production and Characterization of HLE p19 Biparatopic Constructs with Extended Half-Life

[2597] A) HLE1: Anti Human Serum Albumin Nanobody, ALB-1:

[2598] Trivalent biparatopic anti-p19 Nanobodies were constructed (e.g. P23IL-121A2-9GS-ALB1-9GS-124C4) which comprise of two building blocks corresponding to anti-p19 Nanobodies with in the middle a third building block corresponding to an anti Human Serum Albumin Nanobody building block (ALB-1; SEQ ID NO: 790). The individual building blocks are fused by a 9 Gly/Ser linker (GGGGSGGGS; SEQ ID NO: 792). To test if the positioning of the ALB1 Nanobody influences the potency, we also made a construct with ALB-1 at the C-terminus (e.g. P23IL119A3-35GS-81G2-9GS-ALB1), where the p19 Nanobodies are fused by a 35 Gly/Ser linker and the ALB1 is fused to this by a 9 Gly/Ser linker. The sequences of these trivalent bispecific anti-p19 Nanobodies are also shown in FIG. 30.

[2599] These constructs were cloned in pAX100, transformed to TG1 cells, expressed as c-myc, His6-tagged proteins and subsequently purified from the periplasmic extract by immobilized metal affinity chromatography (IMAC) and size exclusion chromotagraphy (SEC) in the presence of OGP to remove endotoxins. Two of such formatted Nanobodies were produced at larger scale to test in the acute in vivo mouse splenocyte assay (see example 36).

[2600] P23IL0036=119A3-9GS-ALB1-9GS-81G2 was produced in E. coli and captured on MabCapture A (Poros), eluted using 100 mM Glycine pH 2.5 and immediately neutralized with 150 mM Tris pH8.8. The Nanobody was further polished on Poros 50HS (Poros), incubated, overnight at 4° C., with 50 mM OGP (Octylβ-D-glucopyranoside, Sigma) for LPS-removal, followed by SEC (Superdex75pg, GE Healthcare). P23IL0044=119A3(H37Y-M43K)-9GS-ALB1-9GS-81A12 was first recloned in pAX98 (which results in P23IL0049) and transformed Pichia pastoris. It was then purified starting from the clarified fermentation broth of the recombinant Pichia pastoris, expressing the Nanobody®. The fermentation broth was made particle free and concentrated in D-PBS via tangential flow filtration using respectively 0.22 μm and 10KMWCO HydroSart cassettes (Sartorius). The TFF retentate was further processed on MabCaptureA (Poros), after elution using 100 mM Glycine pH 2.5, fractions were neutralized with 150 mM Tris pH7.5 and dialysed to 1/10 PBS (SnakeSkin Pleated Dialysis Tubing 10,000 MWCO (Pierce, ref 68100)). The Nanobody was polished via cation exchange chromatography (Poros 50HS, Poros) followed by Size exclusion chromatography (Superdex75 pg, GE Healthcare).

[2601] B) HLE2: HSA

[2602] A HSA fusion of the biparapic anti-p19 nanobody P23IL119A3-35GS-81G2 was made by fusing HSA directly to the C-terminus of this construct. This occurred by ligating the coding sequence for P23IL119A3-35GS-81G2 into the pAX99 vector (which is pPICZalphaA vector containing the coding sequence for full length human serum albumin) resulting in P23IL0041=P23IL119A3-35GS-81G2-HSA. The plasmid was transformed into Pichia pastoris strain X33. It was then purified starting from the clarified fermentation broth of the recombinant Pichia pastoris, expressing the Nanobody. The clarified fermentation broth was made particle free via TFF (Hydrosart 0.22 μm cassette, Sartorius), followed by a concentration and diafiltration step to PBS using TFF (PESU-AL cassette Sartorius). The protein of interest was purified via a capture step on MabCaptureA (Poros) and further polishing steps using Poros50HQ and Superdex200 XK26/60.

[2603] C) HLE3: PEG

[2604] In order to pegylate biparatopic Nanobodies, constructs were generated whereby the C-terminal tag was replaced by a GGGC-sequence. Therefore the coding sequences of P23IL119A3-35GS-81G2 and of P23IL-121A2-35GS-124C4 were cloned into vector. Constructs were expressed in TG1. Purification and pegylation was carried out as follows: Nanobody P23IL0038=P23IL119A3-35GS-81G2-GGGC was captured on MabSelect Xtra™ (GE Healthcare) and eluted using 100 mM Glycine pH 2.5. The collected sample was immediately neutralized using 150 mM Tris pH7.5, dialyzed against 1/10 PBS (SnakeSkin Pleated Dialysis Tubing 10,000 MWCO (Pierce, ref 68100)) and further polished via CEX (Poros 50HS, Poros) in the presence of 5 mM DTT. The fraction containing the Nanobody was concentrated via Vivaspin (5 kDa), DTT was added to a final concentration of 10 mM and incubated overnight. After removal of the excess of free DTT by SEC (Superdex 75pg XK16/60, GE healthcare), the reduced Nanobody was incubated overnight with a 5 molar excess of branched-mPEG40 (NOF, SunBright GL2-400MA). The PEGylated Nanobody was further purified on MacroCap SP (GE Healthcare) to remove the excess of non-reacting PEG40. Finally, the PEGylated Nanobody was treated overnight with 50 mM Octylβ-D-glucopyranoside (Sigma) for LPS-removal, and sized using Superdex75pg (GE Healthcare).

[2605] For the generation of a second batch of pegylated P23IL0038, the Nanobody was captured on MabCapture A (POROS), eluted using 100 mM Glycine pH 2.5 and immediately neutralized using 150 mM Tris pH7.5. After overnight dialysis at 4° C. (SnakeSkin Pleated Dialysis Tubing 10,000 MWCO (Pierce, ref 68100)) against 5 L 1/10 PBS, the sample was further polished on Poros 50HS (PoroS), followed by a reduction with 10 mM DTT. The excess of DTT was removed by SEC (Superdex75pg, GE healthcare) and the reduced Nanobody was coupled to linear-mPEG40 (40 kDa methoxy poly (ethylene glycol) maleimido-propionamice, Dow Pharma). The PEGylated Nanobody was separated from the excess of mPEG40 and non-reacting Nanobody on MacroCap SP (GE healthcare). Finally, the PEGylated Nanobody was treated with 50 mM Octylβ-D-glucopyranoside (Sigma) for LPS-removal, followed by a final a SEC (Superdex75pg, GE Healthcare).

[2606] Nanobody P23IL0039=P23IL-121A2-35GS-124C4-GGGC was captured on MabSelect Xtra™ (GE Healthcare) and eluted using 100 mM Glycine pH 2.5. The collected sample was immediately neutralized using 150 mM Tris pH7.5, and further polished via Anion exchange chromatography (Poros 50HQ, Poros). The fraction containing the Nanobody was reduced in the presence of 10 mM DTT. After an overnight incubation, the excess of free DTT was removed by size exclusion chromatography (Superdex 200pg XK26/60, GE healthcare). The reduced Nanobody was incubated overnight with a 5 molar excess of branched-mPEG40 (NOF, SunBright GL2-400MA). The PEGylated Nanobody was further purified on MacroCap SP (GE Healthcare) to remove the excess of non-reacting PEG40. Finally, the PEGylated Nanobody was sized using Superdex 200pg XK26/60 (GE Healthcare).

### Example 30

### Splenocyte Assay of FILE Nanobodies and Cross-Reactivity on Cynomolgus IL-23

[2607] The HLE nanobodies of Example 29 were tested and compared in the splenocyte assay as described in Example 25, results are shown in Table B-18. All three type of HLE are suitable since no FILE type leads to loss of potency, on the contrary, potency slightly improves. Also the position of the ALB1 Nanobody does not influence the potency. As the 9GS-ALB1-9GS moiety can efficiently replace the 35Gly/Ser-linker, anti-p19 biparatopic Nanobodies containing the P23IL37D5 building block, were immeadiately constructed, expressed and tested as HLE Nanobodies with ALB1 in the middle.

[2608] In addition, cross reactivity towards cynomolgus IL-23 was checked. All anti-p19 biparatopic Nanobodies containing the P23IL119A3 and the P23IL37D5 building block are cross-reactive, the ones containing the P23IL-121A2 building block are not.

TABLE B-18
Comparison of potencies of anti-p19 biparatopic Nanobodies with
different HLE in splenocyte assay with 19 pM hIL-23 or 3.8 pM
cynomolgus IL-23 (cIL-23), nb = not blocking; nt= not tested

| Nanobody/mAB | hIL-23 IC50 (pM) | cIL-23 IC50 (pM) |
|---|---|---|
| P23IL119A3-35GS-81A121 | 7.0 | 5.0 |
| P23IL119A3-9GS-ALB1-9GS-81A12 | 2.5 | 3.3 |
| P23IL119A3(H37Y)- 9GS-ALB1-9GS-81A12 | 2.1 | 2.8 |
| P23IL119A3(H37Y-M43K)- 9GS-ALB1-9GS-81A12 | 3.1 | 4.3 |
| P23IL119A3-35GS-81G2 | 12.0 | 13.0 |
| P23IL119A3-9GS-ALB1-9GS-81G2 | 4.0 | 3.0 |
| P23IL119A3-35GS-81G2-9GS-ALB1 | 4.4 | 6.2 |
| P23IL119A3-35GS-81G2-HSA | 5.4 | 8.1 |
| P23IL119A3-35GS-81G2-GGGC-PEG40 branched | 5.6 | 5.3 |
| P23IL119A3-35GS-81G2-GGGC-PEG40 linear | 7.1 | 4.7 |
| P23IL-121A2-35GS-119G7 | 26.0 | nb |
| P23IL-121A2-9GS-ALB1-9GS-119G7 | 39.0 | nb |
| P23IL-121A2-35GS-81G2 | 154.0 | nb |
| P23IL-121A2-9GS-ALB1-9GS-81G2 | 8.0 | nb |
| P23IL-121A2-9GS-ALB1-9GS-124C4 | 22.0 | nb |
| P23IL-121A2-35GS-124C4-GGGC-PEG40 branched | 66.0 | nb |
| BM01 | 14.2 | 28.0 |
| P23IL37D5 | 24 | 212 |
| P23IL37D5-9GS-ALB1 | 29.8 | 419 |
| P23IL37D5-9GS-ALB1-9GS-124C4 | 8.6-17 | 130-258 |
| P23IL37D5-9GS-ALB1-15GS-124C4 | 1.57-3.1 | 129-257 |
| P23IL37D5-9GS-ALB1-9GS-20B11 | 0.55-1.1 | 3.4-6.9 |
| P23IL-124C4-15GS-ALB1-9GS-37D5 | 4.2 | 3.2 |
| P23IL37D5-15GS-ALB1-15GS-20B11 | 5.77 | 5.75 |
| P23IL37D5-15GS-ALB1-15GS-124C4 | 3.83 | 18.6 |
| P23IL20B11-9GS-ALB1-9GS-37D5 | 4.47 | 8.59 |
| P23IL-124C4-15GS-ALB1-15GS-37D5 | 2.25 | nt |

### Example 31

### Effect of Biparatopic/Bispecific Anti-hIL-23 Nanobodies on hIL-23 Induced Ba/F3-hIL12Rβ1-hIL23R Cell Proliferation

[2609] The Ba/F3-hIL12Rβ1-hIL23R subclone 5H10, generated as described in Example 26, is cultured in RPMI supplemented with 10% FBS, 1% Pen/Strep, 10% conditioned medium of WEHI-3B cell line, 1 mg/ml G418 and 1.1 mg/ml Hygromycin B. The cells are washed three times in RPMI supplemented with 10% FBS and 1% Pen/Strep. The cells are incubated for 1 hour in this mIL-3-free medium at a cell density of 3E06-5E06 cells/ml to remove all residual growth factor.

[2610] To evaluate the neutralizing capacity of the different Nanobodies, 50 μl of Nanobody dilution is pre-incubated for 30 minutes with 50 μl hIL-23 (final concentration of 4 ng/ml) in 96-well flat bottom plates (Greiner bio-one, Cat 655180). Next, 50 μl Ba/F3-hIL12Rβ1-hIL23R cells are added to these pre-incubated samples to reach a final density of 50000 cells/well.

[2611] After 24 hours at 37° C. in presence of 5% CO₂, cell viablility was measured using CellTiter-Glo® Luminescent Cell Viability Assay (Promega G7571) according to the manufacturer's instructions. The HLE Nanobodies of Example 29 that were tested are able to efficiently block the proliferation of these cells as shown in Example 32.

### Example 32

### IL-23 Dependent BAF3 Proliferation Assay of HLE Nanobodies

[2612] The HLE Nanobodies of Example 29 were also tested and compared in the hIL-23 dependent BAF3 proliferation assay as described in example 27 using 76 pM hIL-23. All Nanobodies tested are able to efficiently block the proliferation of these cells as shown in Table B-19.

TABLE B-19
potencies in the BAF3 proliferation assay using 76 pM hIL-23

| Nanobody/mAB | IC 50 (pM) |
|---|---|
| P23IL119A3(H37Y-M43K)-9GS-ALB1-9GS-81A12 | 46.5 |
| P23IL119A3-35GS-81G2-HSA | 61.4 |
| P23IL119A3-35GS-81G2-GGGC-PEG40 linear | 58.5 |
| P23IL119A3-35GS-81G2-GGGC-PEG40 branched | 61.2 |
| BM01 | 59.7 |
| P23IL37D5-9GS-ALB1-9GS-20B11 | 19.5 |
| P23IL-124C4-9GS-ALB1-9GS-37D5 | 13.5 |
| BM01 | 33.2 |
| PIL2337D5 | 13 |
| BM01 | 41 |

### Example 33

### Induction of Native Human IL-23 and Determination of the Potency of the ULE Nanobodies Towards this Native Human IL-23

[2613] The human monocytic cell line THP-1 (ATCC TIB-202) was used for the production of native human IL-23. THP-1 cells were cultured in RPMI1640 medium supplemented with 10% fetal bovine serum, 100 U/mL penicillin and 100 μg/mL streptomycin (all from Invitrogen, Carlsbad, USA). Cells were maintained by subculturing every 2-3 days, keeping the cell density between 10⁴-10⁶ cells/mL. Secretion of IL-23 was induced by stimulating THP-1 cells with fixed Staphylococcus aureus cells (SAC; Pansorbin, Calbiochem, Merck). TRP-1 cells (2.5-5×10⁶ cells/mL) were stimulated for 20-24 hours with 0.05% SAC (37° C 5% CO₂). Subsequently, the supernatant was harvested by centrifugation (200 g, 5 min, room temperature), filtered (0.22 μm PVDF, Millipore, Ireland) to remove remaining cells and debris and stored at −70° C. The concentration of human IL-23 was determined using the Human IL-23 (p19/p40) Elisa Ready-SET-Go! kit (eBioscience, San Diego, USA). Typically, 20-40 ng/mL human IL-23 was induced. The IL-23 containing supernatant was then used as a source of IL-23 in the mouse splenocyte assay to determine whether the Nanbodies are able to neutralize native human IL-23. A limited panel of the biparatopic Nanobodies were tested and all of them were capable to neutralize the native hIL-23 as indicated in Table B-20.

TABLE B-20
potencies in splenocyte assay with 19 pM native hIL-23

| | hIL-23 IC50 | |
|---|---|---|
| Nanobody/mAB | (pM) | assay |
| P23IL119A3-35GS-81G2 | 76 | Expt 1 |
| P23IL119A3-35GS-81G2 | 153 | Expt 1 |
| P23IL119A3(H37Y-M43K)-9GS-ALB1-9GS- | 9.3 | Expt 2 |
| 81A12 | | |
| P23IL119A3(H37Y-M43K)-9GS-ALB1-9GS- | 20 | Expt 3 |
| 81A12 | | |
| BM01 | 161 | Expt 2 |
| BM01 | 39 | Expt 3 |
| P23IL37D5-9GS-ALB1 | 60 | Expt 3 |
| P23IL37D5-9GS-ALB1-9GS-20B11 | 12 | Expt 3 |
| P23IL-124C4-9GS-ALB1-9GS-37D5 | 10 | Expt 3 |

### Example 34

### ELISA Potency Assay—Inhibition of IL-23 Interaction with IL-23R by Monovalent and Biparatopic Nanobodies

[2614] 96-well plates were coated overnight at 4° C. with anti-Fe Nanobody (6 μg/ml) and subsequently blocked with Superblock T20 (PBS) blocking buffer for 30 min. Different concentrations of monovalent and biparatopic Nanobodies were preincubated with 4 ng/ml hIL-23 for 30 min prior to a 30 min incubation with 300 ng/ml hIL-23R-Fc, after which the mixtures were transferred to the coated wells. Bound hIL-23 was detected for 30 min at room temperature with a 1/750 dilution of Biotinylated anti-human interleukin-12 (IL-12) p40/70 monoclonal antibody (eBiosciences, San Diego, USA) in PBS containing 10% Superblock T20 (PBS) blocking buffer, followed by a 30 min incubation at room temperature with 1/5000 horseradish peroxidase labeled streptavidin in PBS containing 10% Superblock T20 (PBS) blocking buffer. Visualisation was performed with enhanced soluble 3,3′,5,5′-tetramethylbenzidine (esTMB) colouring reagent, after which the coloring reaction was stopped with 1N HCl. The absorbance was measured at 450 nm. As shown in FIG. 45, the p19+ (119A3; 37D5-ALB1) monovalent Nanobodies inhibit the interaction with IL-23R, while p19− (81A12, 81G2) monovalent Nanobodies do not. The biparatopic (230049, 23IL0041 and 23IL0038) Nanobodies have a significantly higher potency to inhibit the hIL-23-hIL-23R interaction than the monovalent ones (FIG. 46). Table B-21 presents the corresponding potencies (IC50) for the different Nanobodies.

TABLE B-21
Potency of monovalent and biparatopic anti-IL23 (p19)
Nanobodies in the inhibition ELISA assay (see SEQ ID
NO: 2490 for the amino acid sequence of 37D5)

| Nanobody | IC50 (pM) |
|---|---|
| 119A3 (SEQ ID NO: 1898) | 1756 |
| 81A12 (SEQ ID NO: 1936) | — |
| 81G2 (SEQ ID NO: 1930) | — |
| 37D5-ALB1 | 37 |
| 23IL0049 (SEQ ID NO: 2544) | 28 |
| 23IL0041 (SEQ ID NO: 2541) | 40 |
| 23IL0038 (SEQ ID NO: 2539) | 32 |

### Example 35

### Optimization of an Acute in vivo Mouse Splenocyte Model

[2615] An acute in vivo mouse splenocyte model was optimized and standardized to analyze the in vivo efficacy of IL-23p 19-neutralizing Nanobodies.

[2616] In this model, neutralization of hIL-23 occurs in vivo with an ex vivo readout of mIL-22 synthesis. In all experiments, C57BL/6 mice have been injected intraperitoneally (i.p.) with hIL-23. Exactly 31 hours after the only/first hIL-23 injection, the mice were bled and subsequently sacrificed. The spleens were removed and the splenocytes were isolated by homogenizing the spleens between frosted glass slides. The splenocytes were washed and resuspended in medium at a concentration of 106 cells/ml. The medium used was RPMI1640 supplemented with 10% FCS, 10 U/ml penicillin, 100 μg/ml streptomycin, 1% non-essential amino acids, 1% sodium pyruvate, 2.5 mM HEPES and 0.00035% 2-mercapto ethanol. The cells were seeded at 200,000 cells/200 μl/well in a 96-well culture plate that was pre-coated with hamster anti-mouse CD3e antibody (5 μg/ml in PBS overnight at 4° C.). For each spleen, 6 wells were seeded. The 96-well plates were then incubated for 24 hours in a humidified CO2 incubator. A sandwich ELISA kit for mouse IL-22 (RMF222CK, Antigenix) was used to measure the amount of mIL-22 in each supernatant.

[2617] The results are shown in FIG. 47, which is a graph showing the results obtained in this Example 35 for the inhibition of the mIL-22 synthesis in a mouse splenocyte assay upon administration of 3 microgram hIL-23 alone or in combination 23IL0036. Average mIL-22 synthesis is expressed as % change compared to group 4; and in FIG. 48, which is a graph showing the results obtained in this Example 35 for the inhibition of the mIL-22 synthesis in a mouse splenocyte assay upon administration of 23IL0036 or IRR007 via different routes of administration. Average mIL-22 synthesis is expressed as % change compared to the group which received hIL-23 only.

[2618] In a first experiment, different groups of mice (n=4) were injected i.p. with PBS at t=0 h, 7 h and 31 h (group 1), 1×3 μg hIL-23 at t=0 h (group 2), 2×3 μg hIL-23 at t=0 h and 7 h (group 3) or 3×3 μg hIL-23 at t=0 h, 7 h and 23 h (groups 4, 5 and 6). In groups 5 and 6, 0.2 mg of the anti-IL-23p19 Nanobody 23IL0036 was additionally administered i.p. 2 hours before and 29 hours after the first hIL-23 injection, respectively. The results showed clearly that 2 or 3 injections of hIL-23 are needed to get a considerable induction of mIL-22 synthesis (FIG. 47). The results were normalized to the mean mIL-22 concentration of group 4, which was injected with 3×3 μg hIL-23. Based on these results, we decided to induce mIL-22 synthesis in subsequent experiments with three injections of 3 μg hIL-23 at t=0 h, 7 h and 23 h. In addition, we have demonstrated with this experiment that neutralization of hIL-23 is required, during the in vivo phase and not ex vivo as 23IL0036 can inhibit mIL-22 synthesis when administered 2 hours before the first hIL-23 injection and not when administered 2 hours before the isolation of the splenocytes (FIG. 47).

[2619] In a second experiment, different groups of mice (n=4) were injected with PBS (group 1) or 3×3 μg hIL-23 (groups 2-6). In addition, groups 3-5 were injected with 0.2 mg 23IL0036, while group 6 was injected with the irrelevant Nanobody IRR007. The route of administration of the Nanobodies varied between the different groups. 23IL0036 and IRR007 were administered i.p. in groups 3 and 6, respectively, while 23IL0036 was injected intraveneously (i.v.) in group 4 and subcutaneously (s.c.) in group 5. The results were normalized to the mean mIL-22 concentration of group 2, which was injected with hIL-23 only. There was no difference observed in inhibition of mIL-22 synthesis between the different routes of administration (FIG. 48). Due to the fact that hIL-23 is administered i.p. and we want to inhibit hIL-23 systemically and not in the intraperitoneal cavity, we decided to inject the Nanobodies s.c. in following experiments. The irrelevant Nanobody IRR007 had no effect on mIL-22 synthesis. In FIG. 48, the graph shows the results obtained in this Example 35 for the inhibition of the mIL-22 synthesis in a mouse splenocyte assay upon administration of 23IL0036 or IRR007 via different routes of administration. Average mIL-22 synthesis is expressed as % change compared to the group which received hIL-23 only.

### Example 36

### Dose Range Analysis of the Wild Type Nanobodies 23IL0038, 23IL0041 and 23IL0049 in an Acute in vivo Mouse Splenocyte Model

[2620] Efficacy of the wild type IL-23p19-neutralizing Nanobodies 23IL0038, 23IL0041 and 23IL0049 was demonstrated in the optimized acute in vivo mouse splenocyte model described in Example 35.

[2621] In four separate experiments, C57BL/6 mice were assigned to seven groups, each group consisting of four individuals. All mice from groups 2-7 were 3× injected i.p. with 3 μg hIL-23 at 3 different time points (t=0 h, 7 h and 23 h). The animals from group 1 received PBS instead of hIL-23 at the same time points. In each of the four experiments, 5 different doses of a specific Nanobody or positive control antibody were injected s.c. 2 hours before the first hIL-23 injection. The doses were chosen such that in all experiments the molar excess to each injection of 3 μg hIL-23 was the same for each of the three Nanobodies and positive control antibody BM01 (82-fold, 16-fold, 3.2-fold, 0.64-fold and 0.128-fold excess).

[2622] For each experiment; the results were normalized to the mean mIL-22 concentration of group 2, which was injected with hIL-23 only, and the normalized results are represented in FIGS. 49A to D, which are graphs showing the results obtained in this Example 36 for the inhibition of the mIL-22 synthesis in a mouse splenocyte assay upon administration of Nanobodies (FIG. 49A: 23IL0049; FIG. 49B: 23IL0041; FIG. 49C: 23IL0038) or positive control antibody (FIG. 49D: BM01). Average mIL-22 synthesis is expressed as % change compared to the group which received hIL-23 only.

[2623] All three Nanobodies were capable to neutralize hIL-23 in vivo. The Nanobodies 23IL0049 and 23IL0038 significantly blocked the synthesis of mIL-22 at the four highest doses. The lowest dose of these Nanobodies (0.128-fold excess) still had an effect but could not completely block mIL-22 production. For 23IL0041, the highest three doses blocked the synthesis of mIL-22 significantly, while inhibition in the two lowest dose groups was not complete. The efficacy of the Nanobodies was comparable with the efficacy of BM01.

[2624] The hIL-23 concentration was measured in the final bleeding samples of the groups which were injected with hIL-23 only. The mean serum concentration of hIL-23, 8 hours after the last injection of 3 μg hIL-23, is 22.5 ng/ml.

### Example 37

### Activity of Nanobodies 23IL0050 and 23IL0054 in an Acute in vivo Mouse Splenocyte Model

[2625] The monovalent Nanobody 23IL0050 and the biparatopic Nanobody 23IL0054 have been tested in the acute in vivo mouse splenocyte model described in Example 35. C57BL/6 mice, seven groups with each four mice, were stimulated with 3 μg hIL-23 on t=0 h, 7 h and 23 h. The mice from group 1 received PBS instead of hIL-23 at the same time points. Both Nanobodies were injected s.c. 24 hours before the first hIL-23 injection. Three doses were analyzed and for each dose level the same molar excess with respect to each injection of 3 μg hIL-23 was used (16-fold, 3.2-fold or 0.64-fold excess).

[2626] The results are shown in FIG. 50, which is a graph showing the results obtained in this Example 37 for the inhibition of the mIL-22 synthesis in a mouse splenocyte assay upon administration of P23IL0054 and P23IL0050. The results were normalized to the mean mIL-22 concentration of group 2, which was injected with hIL-23 only.

[2627] Both Nanobodies blocked synthesis of mIL-22 completely at the highest two dose levels. At the lowest dose, there was a clear difference between the monovalent and the biparatopic Nanobody. While the biparatopic 23IL0054 still inhibited mIL-22 synthesis at a 0.64-fold molar excess, mIL-22 concentrations were back to basal levels at the same molar dose of 23IL0050.

### Example 38

### Humanization of P23IL119A3, 81A12, 81G2, 37D5, 20B11 and 124C4

[2628] The amino acid sequence of P23IL119A3 was blasted to the human germline V_{H} sequence database using an in-house sequence query/alignment tool (see FIG. 51A). The human germlines V113-23 (also called DP-47) and JH5 showed the closest related sequence. 10 amino acid residues (indicated in black boxes in 119A3v16 in FIG. 51A) were substituted for humanization purposes and 1 (H37Y) for stability purposes to make P23IL119A3v16 (SEQ ID NO: 2578).

[2629] In the humanization process of P23IL119A3, eighteen P23IL119A3 versions (P23IL119A3-BASIC and P23IL119A3v1 to v17) were constructed. P23IL119A3-BASIC contains 5 substitutions: A14P, H37Y, V78L, K84R and Q108L. In addition to these changes, additional substitutions have been introduced in the v1-v17 versions: V5L, M43K, Q44G, A49S, N58Y, A74S, Q75K, K76N, N82bS and Q93A. They were assembled from oligonucleotides using a PCR overlap extension method. The constructs were expressed in E. coli and purified by IMAC and desalting.

[2630] All variants were were evaluated for their hIL-23binding capacity by surface plasmon resonance and for their neutralizing activity in alpha-screen and in the splenocyte assay as described in Examples 27 and 35. Also thermal stability of the variants was tested in a thermal shift assay using the Lightcylcer (Roche). In this assay the Nanobodies variants are incubated at different pH values in the presence of sypro orange and a temperature gradient is applied. When the Nanobodies start denaturing, sypro orange binds and the measured fluorescence increases suddenly, as such a melting temperature can be determined for a certain pH. The analysis occurred in two rounds, in a first round single mutations upon the basic variants were evaluated, and based upond these results, new variants were made with combined mutations. Results are summarized in Table B-22.

[2631] Binding kinetics of the second round variants are in depth analysed by Surface Plasmon Resonance (Biacore 3000). Human soluble IL-23 was covalently bound to CM5 sensor chips surface via amine coupling using EDC/NHS for activation and HCl for deactivation. Nanobody binding was assessed at one concentration (100 nM). Each Nanobody was injected for 4 minutes at a flow rate of 45 μl/min to allow binding to chip-bound antigen. Next, binding buffer without Nanobody was sent over the chip at the same flow rate to allow spontaneous dissociation of bound Nanobody. From the sensorgrams obtained for the different Nanobodies k_{off}-values (k_{d}) were calculated and are indicated in Table B-23. Association rate constants (kₒₙ or kₐ), and hence also K_{D} values, were only indicative as only one concentration of Nanobody was used to fit the binding model. Results are summarized in Table B-23

TABLE B-22
results of analysis of round 1 humanisation for P23IL119A3

| | | | | | IC 50 | IC 50 | |
|---|---|---|---|---|---|---|---|
| | Biacore offrate | Biacore offrate | IC 50 (nM) α- | IC 50 (nM) α- | splenocyte | splenocyte | Stability |
| | (s−1) kd1 125- | (s−1) kd2 200- | screen hIL-23 | screen cIL-23 | assay hIL-23 | assay cIL-23 | (Tm in ° C. |
| Nanobody | 155 s | 1000 s | hIL-23R | hIL-23R | (nM) | (nM) | at pH 7.5) |
| P23IL119A3 | 4.1^{E}−03 | 1.4^{E}−03 | 1.21 | 0.50 | 16.8 | 60.5 | 70.24 |
| P23IL119A3-BASIC | 5.2^{E}−03 | 2.0^{E}−03 | 1.47 | 0.73 | 37.3 | 66.6 | 56.96 |
| P23IL119A3v1 | 5.6^{E}−03 | 2.0^{E}−03 | 0.91 | 0.54 | 33.0 | 37.4 | 61.11 |
| P23IL119A3v2 | 5.4^{E}−03 | 2.1^{E}−03 | 1.48 | 0.88 | 42.1 | 27.4 | 56.55 |
| P23IL119A3v3 | 5.0^{E}−03 | 2.1^{E}−03 | 9.07 | 4.40 | — | — | — |
| P23IL119A3v4 | 5.2^{E}−03 | 2.0^{E}−03 | 7.71 | 0.66 | — | — | 63.60 |
| P23IL119A3v5 | 5.4^{E}−03 | 1.9^{E}−03 | 2.23 | 3.79 | 35.9 | 71.7 | 56.13 |
| P23IL119A3v6 | 5.4^{E}−03 | 1.7^{E}−03 | 1.51 | 0.90 | 33.7 | 66.9 | 60.28 |
| P23IL119A3v7 | 1.3^{E}−02 | 7.8^{E}−03* | 12.10 | 12.84 | 79.3 | 190 | 65.28 |
| P23IL119A3v8 | 5.9^{E}−03 | 2.1^{E}−03 | 2.47 | 0.55 | 44.7 | 74.3 | 59.06 |
| P23ILI19A3v9 | 1.7^{E}−02 | 8.9^{E}−03* | 8.22 | 4.81 | 191.0 | 167 | 65.70 |

TABLE B-23
results of analysis of round 2 humanisation for P23IL119A3

| | | | | | | IC 50 | IC 50 | |
|---|---|---|---|---|---|---|---|---|
| | Biacore kon | Biacore koff | | IC 50 (nM) | IC 50 (nM) | splenocyte | splenocyte | Stability |
| | (Ms−1) | (s−1) | Biacore Kd | α-screen | α-screen | assay hIL-23 | assay cIL-23 | (Tm in ° C. |
| Variant | hlL-23 | hIL-23 | (M) hIL-23 | hIL-23 | cIL-23 | (nM) | (nM) | at pH 7.5) |
| P23IL119A3 | 3.7E+06 | 4.8E−03 | 1.4E−09 | 0.76 | 0.42 | 16.8 | 60.5 | 70.65 |
| P23IL119A3v10 | 3.5E+06 | 5.5E−03 | 1.6E−09 | 5.90 | 2.75 | 27.58 | 85.90 | 56.92 |
| P23IL119A3v11 | 2.1E+06 | 1.5E−02 | 7.2E−09 | 2.47 | 3.93 | 48.60 | 220.30 | nd |
| P23IL119A3v12 | nd | nd | nd | nd | nd | nd | nd | nd |
| P23IL119A3v13 | 2.6E+06 | 1.5E−02 | 5.8E−09 | 3.07 | 2.09 | 110.40 | 308.80 | 62.33 |
| P23IL119A3v14 | 1.7E+06 | 1.7E−02 | 1.0E−08 | 4.42 | 1.26 | nd | 349.30 | nd |
| P23IL119A3v15 | — | 4.8E−03-1.9E−03 | — | nd | nd | nd | nd | nd |
| P23IL119A3v16 | — | 5.5E−03-1.9E−03 | — | 1.24 | 0.70 | 45.12 | 82.60 | 63.58 |
| P23IL119A3v17 | 2.7E+06 | 5.0E−03 | 1.9E−09 | 2.17 | 0.21 | 14.2 | 56.50 | nd |

(nd = not determined)

[2632] The amino acid sequence of P23IL81A12 was blasted to the human germline V_{H} sequence database using an in-house sequence query/alignment tool (FIG. 51B). Human germline VH3-23 (also called DP-47) and JH5 showed the closest related sequence. 8 amino acid residues (indicated in black boxes in 81A12v4 in FIG. 51B) were substituted for humanization purposes to make P23IL81A12v4 (SEQ ID NO: 2584).

[2633] In the humanization process of P23IL81A12, five P23IL81A12 versions (P23IL81A12-BASIC and P23IL81A12v1 to v4) were constructed. P23IL81A12-BASIC contains 4 substitutions: A14P, V78L, K84R and Q108L. In addition to these changes, additional substitutions have been introduced in the v1-v4 versions: V5L, E44G, A49S and A74S. They were assembled from oligonucleotides using a PCR overlap extension method. The constructs were expressed in E. coli and purified by IMAC and desalting.

[2634] All variants were were evaluated for their hIL-23binding capacity by surface plasmon resonance and also thermal stability of the variants was tested. The analysis occurred in two rounds, in a first round single mutations upon the basic variants were evaluated of which results are summarized in Table B-24.

TABLE B-24
results of round 1 humanisation of P23IL81A12

| | | Stability |
|---|---|---|
| | Biacore offrate | (Tm in ° C. |
| Nanobody | (s−1) hIL-23 | at pH 7.5) |
| P23IL81A12 | 2.2E−04 | 67.34 |
| P 23IL81A12-BASIC | 2.4E−04 | 66.09 |
| P 23IL81A12v1 | 2.4E−04 | 65.26 |
| P 23IL81A12v2 | 2.1E−04 | 59.45 |
| P 23IL81A12v3 | 2.3E−04 | 66.09 |

[2635] A final variant with all mutations: P23IL 81A12v4 was prepared and tested. Results of the analysis of this final variant are shown in Table B-25. This molecule is 91.95% human in the framework regions (according to the Kabat numbering)

TABLE B-25
results of round 2 humanisation of P23IL81A12

| | | | | Stability |
|---|---|---|---|---|
| | Biacore kon | Biacore koff | Biacore Kd | (Tm in ° C. |
| Nanobody | (Ms−1) hIL-23 | (s−1) hIL-23 | (M) hIL-23 | at pH 7.5) |
| P23IL81A12 | 5.60E+05 | 2.10E−04 | 3.80E−10 | 67.32 |
| P23IL81A12v4 | 6.00E+05 | 2.00E−04 | 3.30E−10 | 56.55 |

[2636] The amino acid sequence of P23IL81G2 was blasted to the human germline V_{H} sequence database using an in-house sequence query/alignment tool (FIG. 51C). Human germline VH3-23 (also called DP-47) and JH5 showed the closest related sequence. 11 amino acid residues (indicated in black boxes in 81G2v11 in FIG. 51C) were substituted for humanization purposes to make P23IL81G2v11 (SEQ ID NO: 2597).

[2637] In the humanization process of P23IL81G2, twelve P23IL81G2 versions (P23IL81G2basic and P23IL81G2v1 to v11) were constructed. P23IL81A12basic contains 2 substitutions: E44G and Q108L. In addition to these changes, additional substitutions have been introduced in the v1-v11 versions: V5L, I22A, A49S, G60A, F62S, A68T, A74S, T78L, W79Y K83R and T105Q. They were assembled from oligonucleotides using a PCR overlap extension method. The constructs were expressed in E. coli and purified by IMAC and desalting. All variants were were evaluated for their hIL-23 binding capacity by surface plasmon resonance and also thermal stability of the variants was tested. The analysis occurred in two rounds, in a first round single mutations upon the basic variants were evaluated of which results are summarized in Table B-26.

TABLE B-26
results of round 1 humanisation of P23IL81G2

| | | Stability |
|---|---|---|
| | Biacore koff | (Tm in ° C. |
| Nanobody | (s−1) hIL-23 | at pH 7.5) |
| P23IL81G2 | 3.4E−04 | 64.43 |
| P23IL81G2-BASIC | 3.2E−04 | 63.60 |
| P23IL81G2v1 | 3.4E−04 | 62.36 |
| P23IL81G2v2 | 2.4E−04 | 58.62 |
| P23IL81G2v3 | 4.2E−04 | 66.51 |
| P23IL81G2v4 | 6.5E−04 | 65.26 |
| P23IL81G2v5 | 3.1E−04 | 65.68 |
| P23IL81G2v6 | 3.2E−04 | 64.02 |
| P23IL81G2v7 | 2.8E−04 | 61.13 |
| P23IL81G2v8 | 3.7E−04 | 64.45 |
| P23IL81G2v9 | 3.4E−04 | 65.28 |
| P23IL81G2v10 | 3.2E−04 | 64.04 |

[2638] A final variant with all mutations except the ones from V3 and V4: P23IL 81G2v11 was prepared and tested. The result of the analysis of this final variant is shown in Table B-27. This molecule is 92.10% human in the framework regions (according to the Kabat numbering)

TABLE B-27
results of round 2 humanisation of P23IL81G2

| | | | | Stability |
|---|---|---|---|---|
| | Biacore kon | Biacore koff | Biacore Kd | (Tm in ° C. |
| Nanobody | (Ms−1) hIL-23 | (s−1) hIL-23 | (M) eBiosc hIL-23 | at pH 7.5) |
| P23IL81G2 | 5.20E+05 | 3.90E−04 | 7.50E−10 | 64.41 |
| P23IL81G2v11 | 6.10E+05 | 3.10E−04 | 5.10E−10 | 62.75 |

[2639] The amino acid sequence of P23IL37D5 was blasted to the human germline V_{H} sequence database using an in-house sequence query/alignment tool (FIG. 51D). Human germline VH3-23 (also called DP-47) and JH5 showed the closest related sequence. 8 amino acid residues (indicated in yellow and blue in 37D5v16 in FIG. 51D) can be substituted for humanization purposes to make P23IL37D5v16 (SEQ ID NO: 2601). In this case the basic variant was made, containing mutations V5L, E44G, K84R and Q108L. Then a mini-library of the basic mutant with 16 (2⁴) permutations at positions 74, 75, 76 and 78 was constructed. The library was transformed in TG1 and individual colonies were picked and gown in a 96 well plate. Periplasmic extracts were prepared and screened for off-rates and in the blocking alpha-screen. Also sequences of these clones were determined.

[2640] The variants with no loss or minor loss in potency and affinity were produced and purified by IMAC and desalting and are in depth analysed. Results are shown in Table B-28. The amino acid residues that are changed for humanisation purposes are indicated with black boxes in the variants in FIG. 51D).

TABLE B-28
results of analysis of humanisation for P23IL37D5

| | | Stability | |
|---|---|---|---|
| | IC 50 (pM) comp | (Tm in ° C. | IC50 potency |
| Nanobody | α-screen hIL-23 | at pH 7.5) | assay (pM) |
| P23IL37D5 | 176 | 69.02 | 38.44 |
| P23IL37D5v1 | 128 | 66.53 | 36.36 |
| P23IL37D5v3 | 79 | 68.19 | 60.15 |
| P23IL37D5v6 | 66 | 68.60 | 71.95 |
| P23IL37D5v16 | 44 | 71.93 | 88.76 |
| P23IL37D5v17 | 93 | 63.62 | 185.51 |

The amino acid sequence of P23IL-124C4 was blasted to the human germline V_{H} sequence database using an in-house sequence query/alignment tool (FIG. 51E). Human germline VH3-23 (also called DP-47) and JH5 showed the closest related sequence. Six amino acid residues can be substituted for humanization purposes. The basic variant P23IL-124C4-BASIC was made and contains mutations E44G and V78L. In addition to these changes, additional substitutions have been introduced in the v1-v3versions: S71R, A74S and K105Q. They were assembled from oligonucleotides using a PCR overlap extension method. The constructs were expressed in E. coli and purified by IMAC and desalting.

### Example 39

### Construction and Production of Different Formats of the Humanized Nanobodies

[2641] Biparatopic anti-p19 Nanobodies were constructed with three different types of HLE, using the building blocks P23IL119A3v16 or P23IL119A3v10, P23IL81G2v11 or P23IL81A12v4. Some preferred, but non-limiting examples of the different formatted humanized Nanobodies with corresponding Nanobody IDs are represented in FIG. 32.

[2642] A) HLE1: Anti Human Serum Albumin Nanobody

[2643] The trivalent humanized biparatopic molecules (P23IL0057 and P23IL0058/0064) have two building blocks corresponding to humanized anti-p19 Nanobodies with in the middle a third humanized Nanobody building block corresponding to an anti-Human Serum Albumin Nanobody building block. The individual building blocks are fused by a 9 Gly/Ser (GGGGSGGGS; SEQ ID NO: 792) linker. P23IL0057 consists of P23IL119A3v10 and P23IL84A12, whereas P23IL0058 consists P23IL119A3v16 and P23IL84A12. The constructs were transformed into TG1. After expression, these Nanobodies were purified from the periplasmic extract by capturing on Mabselect Extra and elution with 100 mM Glycine pH 2.5 followed by immediate neutralization with 1 M TrisHCl pH7.5. The sample was polished by cation exchange using a Mono S HR5/50 column (GE healthcare) and size exclusion on Superdex 75 10/300 GL (GE healthcare).

[2644] For the production of large batches of these Nanobodies, the constructs were cloned in pAX89 (a modified pPICZalphaA vector, Invitrogen, Carlsbad, Calif.) and transformed in Pichia pastoris strain X33. Nanobody P23IL0064 was purified starting from the clarified fermentation broth of the recombinant Pichia pastoris, expressing the Nanobody Nanobody. The clarified fermentation broth was made particle free via TFF (Hydrosart 0.22 μm cassette, Sartorius), followed by a concentration and diafiltration step to PBS using TFF (Hydrosart 10 kDa MWCO-cassette Sartorius). The Nanobody was captured on MabCapture A (Poros), followed by a buffer switch to 1/10 PBS via SEC (Sephadex G25 fine, GE healthcare) and a polish step on Poros 50HS (Poros). After treatment with 50 mM Octylβ-D-glucopyranoside (Sigma) for LPS-removal, the Nanobody was sized on a Superdex 75 pg (GE Healthcare).

[2645] B) HLE2: HSA:

[2646] The HSA-fused humanized bipartopic Nanobody (P23IL0065) consists of two building blocks corresponding to humanized anti-p19 Nanobodies P23IL119A3v16 and P23IL81G2v11 fused by a 35 Gly/Ser linker. HSA was fused directly to the C-terminus of this construct. This occurred by ligating the coding sequence for P23IL119A3v16-35GS-81G2v11 into the pAX99 vector (which is a pPICZalphaA vector containing the coding sequence for full length human serum albumin). The plasmid was transformed into Pichia pastoris strain X33. The Nanobodywas purified starting from the clarified fermentation broth of the recombinant Pichia pastoris, expressing the Nanobody. The clarified fermentation broth was made particle free via TFF (Hydrosart 0.22 μm cassette, Sartorius), followed by a concentration and diafiltration step to PBS using TFF (PESU-AL cassette Sartorius). The protein of interest was captured on Blue Sepharose 6FF (GE Healthcare, Uppsala, Sweden) and further purified via polishing steps using Poros50HQ and Superdex200 XK26/60.

[2647] C) HLE3: PEG:

[2648] The pegylated humanized biparatopic Nanobody P23IL0062/0063, consists of two building blocks corresponding to humanized anti-p19 Nanobodies P23IL119A3v16 and P23IL81G2v11 fused by a 35 Gly/Ser linker. A GGGC sequence was added at the C-terminus of the construct. This occurred by ligating the coding sequence of P23IL119A3v16-35GS-81G2v11 in the pAX97 vector (which is a pPICZalphaA vector containing this GGGC sequence) resulting in P23IL0063 or in the pAX101 vector resulting in P23IL0062. The pAX97 construct was transformed into Pichia pastoris strain X33, and the pAX101 construct in TG1. Purification and pegylation was carried out as follows: The Nanobody P23IL0063 was produced in the Pichia pastoris. The Nanobody was purified starting from the clarified fermentation broth by a capture step on MabCaptureA (Poros), and eluted using 100 mM glycine pH 2.7. After a buffer switch to 1/10 PBS and the protein of interest was further polished on Poros 50HS (Poros), followed by a reduction with 10 mM DTT. The excess of DTT was be removed by SEC (Superdex75pg, GE Healthcare), and the reduced Nanobody was coupled to linear-mPEG40 (40 kDa methoxy poly (ethylene glycol) maleimido-propionamice, Dow Pharma). The PEGylated Nanobody was further purified on MacroCap SP (GE healthcare) to remove the excess of non-reacting PEG40. Finally, the PEGylated Nanobody was treated with 50 mM Octylβ-D-glucopyranoside (Sigma) for LPS-removal, followed by size exclusion chromatography (Superdex75pg, GE Healthcare).

### Example 40

### Characterization of the Formatted Humanized Anti-p19 Nanobodies

[2649] A) Potency in Mouse Splenocyte Assays

[2650] The humanised HLE Nanobodies were tested and compared to the WT HLE Nanobodies in the splenocyte assay using hIL-23 and cynomolgus IL-23 as described in Example 27. Results are shown in Tables B-29 and B-30.

[2651] B) Potency in BAF3 Proliferation Assay

[2652] The humanised HLE Nanobodies were tested and compared to the WT HLE Nanobodies in the BAF3 proliferation assay using 76 pM hIL-23 as described in Example 27. Results are shown in Table B-31.

TABLE B-29
potency of HLE humanized biparatopic anti-p19
Nanobodies in the splenocyte assay with 19 pM
hIL-23 and 3.8 pM cynomolgus IL-23 (cIL-23)

| | hIL-23 | cIL-23 |
|---|---|---|
| | IC50 | IC50 |
| Nanobody/mAB | (pM) | (pM) |
| P23IL119A3V10-9GS-ALB-9GS-81A12V4 | 5.1 | 3.5 |
| P23IL119A3V16-9GS-ALB-9GS-81A12V4 | 4.6 | 6.7 |

TABLE B-30
potency of HLE humanized biparatopic anti-p19 Nanobodies compared
to their non-humanized equivalents in the splenocyte assay with
19 pM hIL-23 and 3.8 pM cynomolgus IL-23 (cIL-23).

| | hIL-23 | cIL-23 |
|---|---|---|
| | IC50 | IC50 |
| Nanobody/mAB | (pM) | (pM) |
| P23IL119A3V16-9GS-ALB8-9GS-81A12V4 | 3.6 | 5.4 |
| P23IL119A3(H37Y-M43K)-9GS-ALB1-9GS-81A12 | 3.1 | 4.3 |
| P23IL119A3V16-35GS-81G2V11-HSA | 4.6 | 6.7 |
| P23IL119A3-35GS-81G2-HSA | 5.4 | 8.1 |
| P23IL119A3V16-35GS-81G2V11-GGGC-PEG40 | 2.7 | 13.1 |
| linear | | |
| P23IL119A3-35GS-81G2-GGGC-PEG40 linear | 7.1 | 4.7 |
| BM01 | 3.2 | 20.3 |

TABLE B-31
potency of HLE humanized biparatopic anti-p19 Nanobodies
versus the non-humanized equivalents in the BA/F3
proliferation assay with 76 pM hIL-23

| Nanobody/mAB | IC 50 (pM) |
|---|---|
| P23IL119A3V16-9GS-ALB8-9GS-81A12V4 | 49 |
| P23IL119A3(H37Y-M43K)-9GS-ALB1-9GS-81A12 | 43 |
| P23IL119A3V16-35GS-81G2V11-HSA | 125 |
| P23IL119A3-35GS-81G2-HSA | 66 |
| P23IL119A3V16-35GS-81G2V11-GGGC-PEG40 linear | 71 |
| P23IL119A3-35GS-81G2-GGGC-PEG40 linear | 71 |
| BM01 | 58 |

[2653] C) ELISA Potency Assays: Inhibition of IL-23 Interaction with IL-23R by Formatted Humanized Nanobodies

[2654] 96-well plates were coated overnight at 4° C. with anti-Fc Nanobody (6 μg/ml) and subsequently blocked with Superblock T20 (PBS) blocking buffer for 30 min. Different concentrations of formatted humanized Nanobodies were preincubated with 4 ng/ml hIL-23 for 30 min prior to a 30 min incubation with 300 ng/ml hIL-23R-Fc, after which the mixtures were transferred to the coated wells. Bound hIL-23 was detected for 30 min at room temperature with a 1/750 dilution of Biotinylated anti-human interleukin-12 (IL-12) p40/70 monoclonal antibody (eBiosciences, San Diego, USA) in PBS containing 10% Superblock T20 (PBS) blocking buffer, followed by a 30 min incubation at room temperature with 1/5000 horseradish peroxidase labeled streptavidin in PBS containing 10% Superblock T20 (PBS) blocking buffer. Visualisation was performed with enhanced soluble 3,3′,5,5′-tetramethylbenzidine (esTMB) colouring reagent, after which the coloring reaction was stopped with 1N HCl. The absorbance was measured at 450 nm. FIG. 52 shows the inhibition of the IL-23 interaction with IL-23R by formatted humanized Nanobodies (23IL0064, 23IL0065 and 23IL0063) and Table B-32 presents the corresponding IC50 values.

[2655] In this assay, also cross-reactivity of the formatted humanized Nanobodies with marmoset IL-23 was illustrated.

TABLE B-32
Potency of formatted humanized anti-IL23(p19)
Nanobodies in the inhibition ELISA assay

| Nanobody | IC50 (pM) |
|---|---|
| 23IL0064 | 23 |
| 23IL0065 | 38 |
| 23IL0063 | 25 |

[2656] D) Binding of 23IL0064 to Human Serum Albumin

[2657] 96-well microtiter plates were coated overnight at 4° C. with recombinant human serum albumin (HSA, 125 μg/ml in PBS). Following aspiration of the wells and 30 min blocking with Superblock T20 (PBS) blocking buffer, wells were incubated for 1 h with a dilution series of 23IL0064. Bound 23IL0064 was detected with a bivalent, horseradish peroxidase (HRP) conjugated Nanobody. After visualization with ⅓ diluted enhanced soluble 3,3′,5,5′-tetramethylbenzidine (esTMB) colouring reagent, the coloring reaction was stopped with 1N HCl and absorbance was measured at 450 nm (FIG. 53).

### Example 41

### Activity of Humanized Nanobodies 23IL0063, 23IL0064 and 23IL0065 in an Acute in vivo Mouse Splenocyte Model

[2658] Efficacy of the humanized IL-23p19-neutralizing Nanobodies 23IL0063, 23IL0064 and 23IL0065 was demonstrated in the acute in vivo mouse splenocyte model described in Example 35.

[2659] In two separate experiments, C57BL/6 mice were assigned to eight groups, each group consisting of four individuals. All mice from groups 2-8 were three times injected IP with 3 μg hIL-23 at three different time points (t=0 h, 7 h and 23 h). The animals from group 1 received PBS instead of hIL-23 at the same time points. The Nanobodies or positive control antibody were injected s.c. 24 hours before the first hIL-23 injection. Spread over the two experiments, Nanobodies 23IL0063, 231L0064 and 23IL0065 were administered at three different doses. The doses were chosen such that the molar excess to each injection of 3 μg hIL-23 was the same for each of the three Nanobodies (16-fold, 3.2-fold or 0.64-fold excess). As positive control, BM01 was used.

[2660] The results were normalized to the mean mIL-22 concentration of group 2, which was injected with hIL-23 only, and are represented in FIGS. 54 and 55. All three Nanobodies were capable of neutralizing hIL-23 and significantly blocked the synthesis of mIL-22 at the two highest doses. The lowest dose of the Nanobodies (0.64-fold excess) still had an effect but could not completely block mIL-22 production. The efficacy of the Nanobodies was comparable with the efficacy of BM01.

### Example 42

### Pharmacokinetics of Biparatopic Wild Type Nanobodies in Mouse

[2661] To determine the pharmacokinetic properties of some representative biparatopic wild-type Nanobodies, seventy-two male Balb/c mice were assigned to six groups, each group consisting of twelve mice. The mice were approximately 12 weeks old with an initial body weight between 19.8 and 24.9 grams.

[2662] Nanobodies 23IL0049, 23IL0041 and 23IL0038 were tested. Animals were dosed intravenously or subcutaneously in a single administration on test day 1 as described in Table B-33. Serum samples were taken for determination of the Nanobody levels and antibody analysis on timepoints described in Table B-34.

TABLE B-33
Study design of the mouse PK study with wild type Nanobodies (23IL0049, 23IL0041 and 23IL0038)
Study design/Group size/Dose levels

| | | | | Administration | Number | |
|---|---|---|---|---|---|---|
| | | Route of | Dose | volume | and sex of | |
| Group | Test item | administration | [μg/animal] | [μL/animal] | animals | Animal no. |
| 1 | 119A3-ALB1- | i.v. | 140 | 200 | 12 m | 1-12 |
| | 81A12 (23IL0049) | | | | | |
| 2 | 119A3-ALB1- | s.c. | 140 | 200 | 12 m | 13-24 |
| | 81A12 (23IL0049) | | | | | |
| 3 | 119A3-81G2-HSA | i.v. | 100 | 200 | 12 m | 25-36 |
| | (23IL0041) | | | | | |
| 4 | 119A3-81G2-HSA | s.c. | 100 | 200 | 12 m | 37-48 |
| | (23IL0041) | | | | | |
| 5 | 119A3-81G2- | i.v. | 100 | 200 | 12 m | 49-60 |
| | PEG40 (23IL0038) | | | | | |
| 6 | 119A3-81G2- | s.c. | 100 | 200 | 12 m | 61-72 |
| | PEG40 (23IL0038) | | | | | |

TABLE B-34
Timepoints of blood sampling in the mouse PK study with
wild type Nanobodies (23IL0049, 23IL0041 and 23IL0038)

| | Time-point of | | Serum volume |
|---|---|---|---|
| Test day | blood sampling | Group | [μL/animal] |
| −1 | predose | 1-6 (12 animals/group of 12 animals) | 75 |
| 1 | 5 min after administration | 1, 3, 5 (4 animals/group of 12 animals) | 100 |
| | 30 min after administration | 2, 4, 6 (4 animals/group of 12 animals) | |
| | 3 h after administration | 1-6 (4 animals/group of 12 animals) | |
| | 8 h after administration | 1-6 (4 animals/group of 12 animals) | |
| 2 | 24 h after administration | 1-6 (4 animals/group of 12 animals) | 100 |
| 3 | 48 h after administration | 1-6 (4 animals/group of 12 animals) | 100 |
| 5 | 4 days after administration | 1-6 (4 animals/group of 12 animals) | 100 |
| 7 | 6 days after administration | 1-6 (4 animals/group of 12 animals) | 100 |
| 9 | 8 days after administration | 1-6 (4 animals/group of 12 animals) | as much as possible |
| 11 | 10 days after administration | 1-6 (4 animals/group of 12 animals) | as much as possible |
| 13 | 12 days after administration | 1-6 (4 animals/group of 12 animals) | as much as possible |

[2663] Concentrations of Nanobodies 23IL0049 (119A3-A1b1-81A12; P1aWT), 23IL0041 (119A3-81G2-HSA; P1bWT) and 23IL0038 (119A3-81G2-PEG40; P1cWT) were determined in serum by three different immunoassays.

[2664] Concentrations of Nanobody 23IL0049 were determined in mouse serum as follows: 96-well microtiter plates (Maxisorp, Nunc, Wiesbaden, Germany) were coated overnight at 4° C. with 100 μL/well neutravidin (2 μg/mL in PBS, Pierce, Rockford, Ill.). Wells were aspirated and blocked for 30 minutes at room temperature with SuperBlock®T20 PBS (Pierce, Rockford, Ill.) (300 μL/well). After 3 washing steps with PBS-0.05% Tween20, 100 μL/well biotinylated hIL23 (0.2 μg/mL in PBS-0.1% casein-0.05% Tween20; Carrier-Free Recombinant Human IL-23 (p19/p40) eBioScience, San Diego, USA) was captured by incubating for 1 hour at RT while shaking at 600 rpm. Biotinylated hIL23 was prepared with EZ-Link® Sulfo-NHS-LC-Biotin (Pierce, Rockford, Ill., USA) and free biotin was removed using Zeba desalt spin columns (Pierce, Rockford, Ill., USA). After this incubation step, wells were washed 3 times with PBS-0.05% Tween20. All preparations for standards, QC samples and test samples were done in a non-coated (polypropylene) plate. Predilutions of standards and QC samples were prepared in 100% mouse serum. To prepare standards and QC samples, a 1/10 dilution of the predilutions was made in PBS-0.1% casein-0.05% Tween20 (final concentration of mouse serum is 10%). Test samples were diluted 1/10 in PBS-0.1% casein-0.05% Tween20 and where needed further diluted in PBS-0.1% casein-0.05% Tween20 with 10% Mouse Serum (final concentration of mouse serum is 10%). Standards, QC samples and test samples were transferred to the coated plate and incubated for 2 hours at RT while shaking at 600 rpm. After 3 washing steps with PBS-0.05% Tween20, the plates were incubated with 100 μL/well of a rabbit anti-Nanobody polyclonal antibody ( 1/5000 diluted in PBS-0.1% casein-0.05% Tween20) for 1 hour at RT while shaking at 600 rpm. After 3 washing steps with PBS-0.05% Tween20, the plates were incubated with 100 μL/well horseradish peroxidase (HRP) labeled polyclonal goat anti-rabbit ( 1/5000 diluted in PBS-0.1% casein-0.05% Tween20, DakoCytomation, Glostrup, Denmark) for 1 hour at RT while shaking at 600 rpm. Visualization was performed by incubation with 100 μL/well enhanced soluble 3,3′,5,5′-tetramethylbenzidine (esTMB, SDT, Brussels, Belgium). After 10 min, the colouring reaction was stopped with 100 μL/well 1N HCl. The absorbance was determined at 450 nm after a 10 seconds shake in the Tecan ELISA reader, and corrected for background absorbance at 620 nm. Concentration in each sample was determined based on a sigmoid standard curve.

[2665] Concentrations of Nanobody 23IL0041 were determined in mouse serum as follows: 96-well microliter plates (Maxisorp, Nunc, Wiesbaden, Germany) were coated overnight at 4° C. with 100 μL/well neutravidin (2 μg/mL in PBS, Pierce, Rockford, Ill.). Wells were aspirated and blocked for 30 minutes at room temperature with SuperBlock®T20 PBS (Pierce, Rockford, Ill.) (300 μL/well). After 3 washing steps with PBS-0.05% Tween20, 100 μL/well biotinylated hIL23 (0.2 μg/mL in PBS-0.1% casein-0.05% Tween20; Carrier-Free Recombinant Human IL-23 (p19/p40) eBioScience, San Diego, USA) was captured by incubating for 1 hour at RT while shaking at 600 rpm. After this incubation step, wells were washed 3 times with PBS-0.05% Tween20. All preparations for standards, QC samples and test samples were done in a non-coated (polypropylene) plate. Predilutions of standards and QC samples were prepared in 100% mouse serum. To prepare standards and QC samples, a 1/10 dilution of the predilutions was made in PBS-0.1% casein-0.05% Tween20 (final concentration of mouse serum is 10%). Test samples were diluted 1/10 in PBS-0.1% casein-0.05% Tween20 and where needed further diluted in PBS-0.1% casein-0.05% Tween20 with 10% Mouse Serum (final concentration of mouse serum is 10%). Standards, QC samples and test samples were transferred to the coated plate and incubated for 2 hours at RT while shaking at 600 rpm. After 3 washing steps with PBS-0.05% Tween20, the plates were incubated with 100 μL/well of a horseradish peroxidise (HRP) labeled polyclonal goat anti-human albumin ( 1/5000 diluted in PBS-0.1% casein-0.05% Tween20, Nordic Immunology, Tilburg, The Netherlands) for 1 hour at RT while shaking at 600 rpm. Visualization was performed by incubation with 100 μL/well enhanced soluble 3,3′,5,5′-tetramethylbenzidine (esTMB, SDT, Brussels, Belgium). After 10 min, the colouring reaction was stopped with 100 μL/well 1N HCl. The absorbance was determined at 450 nm after a 10 seconds shake in the Tecan ELISA reader, and corrected for background absorbance at 620 mu. Concentration in each sample was determined based on a sigmoid standard curve.

[2666] Concentrations of Nanobody 23IL0038 were determined in mouse serum as follows: 96-well microliter plates (Maxisorp, Nunc, Wiesbaden, Germany) were coated overnight at 4° C. with 100 μL/well Human IL-12/IL-23 p40 MAb (Clone 169516) (2.5 μg/mL in PBS, R&D Systems, Minneapolis, USA). Wells were aspirated and blocked for 30 minutes at room temperature with SuperBlock®T20 PBS (Pierce, Rockford, Ill.) (300 μL/well). After 3 washing steps with PBS-0.05% Tween20, 100 μL/well Carrier-Free Recombinant Human IL-23 (p19/p40) (0.25 μg/mL in PBS-0.1% casein-0.05% Tween20, eBioScience, San Diego, USA) was captured by incubating for 1 hour at RT while shaking at 600 rpm. After this incubation step, wells were washed 3 times with PBS-0.05% Tween20. All preparations for standards, QC samples and test samples were done in a non-coated (polypropylene) plate. Predilutions of standards and QC samples were prepared in 100% mouse serum. To prepare standards and QC samples, a 1/10 dilution of the predilutions was made in PBS-0.1% casein-0.05% Tween20 (final concentration of mouse serum is 10%). Test samples were diluted 1/10 in PBS-0.1% casein-0.05% Tween20 and where needed further diluted in PBS-0.1% casein-0.05% Tween20 with 10% Mouse Serum (final concentration of mouse serum is 10%). Standards, QC samples and test samples were transferred to the coated plate and incubated for 2 hours at RT while shaking at 600 rpm. After 3 washing steps with PBS-0.05% Tween20, the plates were incubated with 100 μL/well of a rabbit anti-Nanobody polyclonal antibody ( 1/2000 diluted in PBS-0.1% casein-0.05% Tween20) for 1 hour at RT while shaking at 600 rpm. After 3 washing steps with PBS-0.05% Tween20, the plates were incubated with 100 μL/well horseradish peroxidase (HRP) labeled polyclonal goat anti-rabbit ( 1/5000 diluted in PBS-0.1% casein-0.05% Tween20, DakoCytomation, Glostrup, Denmark) for 1 hour at RT while shaking at 600 rpm. Visualization was performed by incubation with 100 μL/well enhanced soluble 3,3′,5,5′-tetramethylbenzidine (esTMB, SDT, Brussels, Belgium). After 10 min, the colouring reaction was stopped with 100 μL/well 1N HCl. The absorbance was determined at 450 nm after a 10 seconds shake in the Tecan ELISA reader, and corrected for background absorbance at 620 nm. Concentration in each sample was determined based on a sigmoid standard curve.

[2667] Average plasma concentration-time profiles injected with 23IL0049, 23IL0041 and 23IL0038 were subjected to a compartmental pharmacokinetic analysis using the pre-programmed Model 1-7 and Model 3-4 for IV and SC route of administration, respectively, using WinNonlin Professional Software Version 5.1 (Pharsight Corporation, Mountain View Calif., USA). Model and Weighting discrimination was performed by visual inspection of the fit, and evaluation of minimum AIC (Akaike's Information Criterion), SBC (Schwarz Bayesian Criterion), WRSS (Weighted Residual Sum of Squares) and CV % (Coefficient of variation of the parameters). An overview of the calculated pharmacokinetic parameters is presented in Table B-35 and Table B-36.

[2668] Profiles after intravenous administration of 23IL0038 or 23IL0041-23IL0049 seemed to decline in a mono or biphasic manner, respectively. Profiles after subcutaneous administration of 23IL0049, 23IL0041 and 23IL0038 declined in a monophasic manner after the maximum concentrations were reached. Expected PK parameters were obtained for 23IL0049 and 23IL0038 after both intravenous and subcutaneous administration, with slightly higher terminal half-lives after both intravenous and subcutaneous administration and higher bioavailability for 23IL0049. The terminal half-lives after both intravenous and subcutaneous administration and bioavailability of 23IL0041 were significantly lower.

TABLE 35
Basic pharmacokinetic parameters¹ of 23IL0049, 23IL0041
and 23IL0038 after a single intravenous administration
(100 μg/ml) in the male Balb/c mouse.

| Parameter¹ | 23IL0049^{1,3} | 23IL0041¹ | 23IL0038² |
|---|---|---|---|
| C₍₀₎ (μg/ml) | 132 | 88.3 | 42.4 |
| Vₛₛ (mL) | 2.09 | 1.55 | 2.36 |
| V_{c} (mL) | 1.06 | 1.13 | 2.36 |
| Vₜ (mL) | 1.03 | 0.413 | — |
| CL (mL/day) | 1.06 | 4.99 | 1.43 |
| CL_{d} (mL/day) | 3.85 | 1.97 | — |
| t_{1/2α} (hr) | 2.11 | 1.97 | — |
| t_{1/2β}(day) | 1.46 | 0.277 | 1.14 |
| MRT (day) | 1.97 | 0.310 | 1.65 |
| AUC_{inf}(μg · day/ml) | 132 | 20.0 | 70.0 |
| AUC_{inf}/D (day/ml) | 0.940 | 0.200 | 0.700 |

¹Parameters were calculated with two-compartmental modeling.
²Parameters were calculated with one-compartmental modeling.
³Dose was 140 μg/animal.

TABLE B-36
Basic pharmacokinetic parameters¹ of 23IL0049, 23IL0041
and 23IL0038 after a single subcutaneous administration
(100 μg/animal) in the male Balb/c mouse

| Parameter¹ | 23IL0049² | 23IL0041 | 23IL0038 |
|---|---|---|---|
| V/F (mL) | 2.07 | 16.9 | 3.84 |
| CL/F (mL/day) | 0.929 | 33.9 | 2.04 |
| t_{lag} (hr) | 2.09 | — | 2.41 |
| T_{1/2} _{absoption} | 6.26 | 1.98 | 2.46 |
| (=0.693/K₀₁)(hr) | | | |
| T_{1/2 elimination} | 1.55 | 0.346 | 1.30 |
| (=0.693/K₁₀)(day) | | | |
| tₘₐₓ (day) | 0.894 | 0.218 | 0.508 |
| Cₘₐₓ (μg/ml) | 47.1 | 3.82 | 21.0 |
| AUC_{inf}(μg · day/ml) | 151 | 2.95 | 49.0 |
| AUC_{inf}/D (day/ml) | 1.08 | 0.0295 | 0.490 |
| F (%) | 114 | 14.7 | 70.0 |

¹All parameters were calculated with compartmental modeling.
²Dose was 140 μg/animal.

[2669] No significant antibody titres to 23IL0049 and 23IL0038 Nanobodies are detected in the animals. Little amount of antibodies were seen to 23IL0041 after 6 days after intravenous administration and after 10 days after subcutaneous administration.

### Example 43

### PK of Formatted Humanized Nanobodies (23IL0064, 23IL0065 and 23IL0063) in Mouse

[2670] Humanized IL23 Nanobodies 23IL0064, 23IL0065 and 23IL0063 are administered intravenous and subcutaneous to male Balb/c mice. The concentrations of Nanobodies are measured in serum samples. Antibodies to the Nanobodies are measured.

### Example 44

### PK of Formatted Humanized Nanobodies (23IL0064, 23IL0065 and 23IL0063) in Cynomolgus Monkey

[2671] Humanized IL23 Nanobodies 23IL0064, 23IL0065 and 23IL0063 are administered intravenous and subcutaneous to male cynomolgus monkeys. The concentrations of Nanobodies are measured in serum samples. Antibodies to the Nanobodies are measured.

### Example 45

### Efficacy of 23IL0064, 23IL0065 and 23IL0064 in a Humanized Mouse Psoriasis Model

[2672] The ability of the anti-IL23p19 Nanobodies to suppress aspects of psoriasis in a humanized mouse model is evaluated. This model is based on studies described by Wrone-Smith and Nickoloff (1996). It is the only available model in which the effects of drugs on the development of a human psoriatic lesion can be monitored in vivo. Briefly, non-lesional skin from psoriasis patients are transplanted onto immunodeficient mice and, after acceptance of the grafts, autologous pre-activated PBMCs are intradermally injected triggering the psoriatic process. Mice are treated intraperitoneally twice weekly. After three weeks of treatment, mice are sacrificed and the human skin transplants are evaluated histologically, with regard to epidermal hyperplasia (HE-staining) as well as proliferation and differentiation of keratinocytes (e.g. Ki-67 staining).

### Example 46

### Anti-p40 Biparatopic Nanobodies and Anti-p19-Anti-p40 Bispecific Nanobodies

[2673] A) Construction of Anti-p40 Biparatopic Nanobodies and Anti-p19 Anti-p40 Bispecific Nanobodies

[2674] Based on the data from the epitope grouping experiment with the p40 Nanobodies (Example 26), the following Nanobodies were combined in an anti-p40 biparatopic format: P23IL3C1 with P23IL3B8 or P23IL3G10, P23IL3B8 with P23IL80D10 or P23IL84G12, P23IL-23E3 with P23IL81A1 or P23IL84G1, P23IL-22D7 with P23IL80D10 or P23IL-22D10 and P23IL-22E11 with P23IL80D10 or P23IL84G12 or in an anti-p19 and anti-p40 bispecific format: P23IL119A3 with P23IL3C1, P23IL3B8 or P23IL-23E3 and P23IL37D5 with P23IL-22D7. The influence of the formatting, the positioning of the Nanobodies and the linker lengths on the potency was investigated. All constructs used are listed in FIGS. 33 and 34.

[2675] The coding sequences were cloned in pAX100, transformed in TG1 and expressed as myc-His tagged molecules. They were purified by IMAC, desalting, concentration and gelfiltration in the presence of 50 mM OGP, to remove LPS.

[2676] B) Potency of Anti-p40 Biparatopic Nanobodies and Anti-p19 Anti-p40 Bispecific Nanobodies

[2677] In the Mouse Splenocyte Assay

[2678] The anti-p40 biparatopic and anti-p19 anti-p40 bispecific FILE Nanobodies were tested and compared with the mAB BM01 in the splenocyte assay using hIL-23 and cynomolgus IL-23 as described in Example 27. Results are shown in Table B-37. For the bispecific Nanobodies, all performed well on hIL-23, but P23IL0202 and 0204 performed less on cynomolgus IL-23. For the biparatopic Nanobodies P23IL0406 and 0407 have a bad potency when using cynomolgus IL-23, so their cross-reactivity is not optimal.

TABLE B-37
potency of anti-p40 biparatopic Nanobodies and anti-p19 anti-
p40 bispecific Nanobodies in the mouse splenocyte assay using
19 pM hIL-23 and 3.8 pM cynomolgus IL-23 (cIL-23)

| | hIL-23 | cIL-23 |
|---|---|---|
| | IC50 | IC50 |
| | (pM) | (pM) |
| Bispecific Nanobody/mAB | | |
| BM01 | 5.2 | 23.0 |
| P23IL0200 | 1.9 | 2.6 |
| P23IL0201 | 3.1 | 1.9 |
| P23IL0202 | 5.1 | 34.0 |
| P23IL0203 | 1.8 | 1.7 |
| P23IL0204 | 1.4 | 23.0 |
| P23IL0205 | 2.3 | 3.5 |
| Biparatopic Nanobody/mAB | | |
| BM01 | 4.7 | 29.0 |
| P23IL0400 | 3.0 | 3.3 |
| P23IL0401 | 3.6 | 5.6 |
| P23IL0402 | 11.0 | 8.5 |
| P23IL0403 | 2.7 | 4.9 |
| P23IL0404 | 3.6 | 3.7 |
| P23IL0405 | 4.2 | 6.8 |
| P23IL0406 | 11.0 | 628.0 |
| P23IL0407 | 5.6 | 883.0 |
| P23IL0408 | 4.6 | 6.7 |
| P23IL0409 | 3.0 | 6.8 |

[2679] C) Potency of Anti-p40 Biparatopic Nanobodies and Anti-p19 Anti-p40 Bispecific Nanobodies in the BAF3 Proliferation Assay

[2680] Based on the results from the mouse splenocyte assay, a selected set of anti-p40 biparatopic and anti-p19 anti-p40 bispecific HLE Nanobodies with best potencies were tested and compared with the mAB BM01 in the BA/F3 proliferation assay using 76 pM hIL-23 as described in Example 27. Results are shown in Table B-38.

TABLE B-38
potency potency of anti-p40 biparatopic Nanobodies
and anti-p19 anti-p40 bispecific Nanobodies in
the BA/F3 proliferation assay with 76 pM hIL-23

| Nanobody/mAB | IC 50 (pM) |
|---|---|
| P23IL0200 | 15.4 |
| P23IL0201 | 24.3 |
| P23IL0400 | 19.3 |
| P23IL0402 | 70.8 |
| P23IL0404 | 64.2 |
| BM01 | 33.2 |
| P23IL0405 | 60.3 |
| P23IL0408 | 55.5 |
| P23IL0409 | 33.3 |

[2681] D) Activity on Native hIL-23 in Splenocyte Assays:

[2682] Based on results from the mouse splenocyte assay with recombinant hIL-23, a selected set of anti-p40 biparatopic and anti-p19 anti-p40 bispecific HLE Nanobodies with best potencies, were tested and compared with the mAB BM01 in the mouse splenocyte assay using 19 pM native hIL-23, prepared as described in Example 31. Results are shown in Table B-39.

TABLE B-39
potency of anti-p40 biparatopic Nanobodies and
anti-p19 anti-p40 bispecific Nanobodies in the
mouse splenocyte assay with 19 pM native hIL-23

| Nanobody/mAB | hIL-23 IC50 (pM) |
|---|---|
| BM01 | 39 |
| P23IL0200 | 11 |
| P23IL0201 | 13 |
| P23IL0400 | 12 |
| P23IL0402 | 40 |
| P23IL0404 | 40 |
| P23IL0405 | 88 |
| P23IL0408 | 69 |
| P23IL0409 | 52 |

[2683] E) Potency in IL-12 Dependent PHA Blast Proliferation Assay

[2684] The potency of the neutralization of hIL-12 is determined in the IL-12 dependent PHA blast proliferation assay. Shortly PHA blasts were derived by culturing PBMC in PHA (50 μg/ml) during 3 days and IL-2 (50 U/ml) during one day. These PHA blasts are stimulated with hIL-12 pre-incubated with a dilution series of a Nanobody test items (for instance starting starting from 60 nM u to 0.15 pM or p19-p40 bispecific Nanobodies and p 40 monovalent Nanobodies starting from 2000 nM to 1 pM or control Nanobodies or antibodies. Cells are stimulated for 2 days and pulsed with 1 μCi/well ³H-thymidine for the 6 last hours, hence proliferation was determined by measuring ³H-thymidine incorporation by scintillation counting.

### Example 47

### Activity of Nanobodies 23IL400 and 23IL403 in an Acute in vivo Mouse Splenocyte Model

[2685] The bivalent p40+/p40+ Nanobodies 23IL400 (3B8-ALB1-3C1, SEQ ID NO: 2630) and 23IL403 (3G10-ALB1-3C1, SEQ ID NO: 2633) have been analyzed in the acute in vivo mouse splenocyte model described in Example 35. Seven groups with each four C57BL/6 mice were stimulated with 3 μg hIL-23 on t=0 h, 7 h and 23 h. The mice from group 1 received PBS instead of hIL-23 at the same time points. The positive control antibody (BM01; groups 3 and 4), 23IL400 (groups 5 and 6) and 23IL403 (groups 7 and 8) were injected s.c. 24 hours before the first hIL-23 injection. Two doses were analyzed and for both doses was the molar excess to each injection of 3 μg hIL-23 the same for all three test items (3.2-fold excess and 0.64-fold excess).

[2686] The results are shown in FIG. 51, which is a graph showing the results obtained in Example 38 for the inhibition of the mIL-22 synthesis in a mouse splenocyte assay upon administration of BM01, P23IL0400 and P23IL0403 at two different dose levels.

[2687] The results were normalized to the mean mIL-22 concentration of group 2, which was injected with hIL-23 only. Both Nanobodies blocked synthesis of mIL-22 completely at the highest dose. At the lowest dose, there was a clear difference between 23IL400 and 23IL403. While 23IL400 still inhibited mIL-22 synthesis significantly at a 0.64-fold molar excess, mIL-22 concentrations were almost back to basal levels at the same molar dose of 23IL403. The efficacy of 23IL400 is comparable with BM01.

The application's sequence listing, which the Patent Office published only in electronic form, follows.

SEQUENCE LISTING (2651 sequences)

SEQ ID NO: 1 - protein, 102 aa, Artificial
  KERE-class Nanobody
  misc_feature (31)..(35): CDR
  misc_feature (50)..(54): CDR
  misc_feature (87)..(91): CDR
EVQLVESGGGLVQPGGSLRLSCAASGIPFSXXXXXWFRQAPGKQRDSVAXXXXXRFTISRDNAKNTVYLQMNSLKPEDTAVYRCYFXXXXXWGQGTQVTVSS

SEQ ID NO: 2 - protein, 102 aa, Artificial
  KERE-class Nanobody
  misc_feature (31)..(35): CDR
  misc_feature (50)..(54): CDR
  misc_feature (87)..(91): CDR
QVKLEESGGGLVQAGGSLRLSCVGSGRTFSXXXXXWFRLAPGKEREFVAXXXXXRFTISRDTASNRGYLHMNNLTPEDTAVYYCAAXXXXXWGQGTQVTVSS

SEQ ID NO: 3 - protein, 102 aa, Artificial
  KERE-class Nanobody
  misc_feature (31)..(35): CDR
  misc_feature (50)..(54): CDR
  misc_feature (87)..(91): CDR
AVQLVDSGGGLVQAGDSLKLSCALTGGAFTXXXXXWFRQTPGREREFVAXXXXXRFTISRDNAKNMVYLRMNSLIPEDAAVYSCAAXXXXXWGQGTLVTVSS

SEQ ID NO: 4 - protein, 102 aa, Artificial
  KERE-class Nanobody
  misc_feature (31)..(35): CDR
  misc_feature (50)..(54): CDR
  misc_feature (87)..(91): CDR
QVQLVESGGGLVEAGGSLRLSCTASESPFRXXXXXWFRQTSGQEREFVAXXXXXRFTISRDDAKNTVWLHGSTLKPEDTAVYYCAAXXXXXWGQGTQVTVSS

SEQ ID NO: 5 - protein, 102 aa, Artificial
  KERE-class Nanobody
  misc_feature (31)..(35): CDR
  misc_feature (50)..(54): CDR
  misc_feature (87)..(91): CDR
AVQLVESGGGLVQGGGSLRLACAASERIFDXXXXXWYRQGPGNERELVAXXXXXRFTISMDYTKQTVYLHMNSLRPEDTGLYYCKIXXXXXWGQGTQVTVSS

SEQ ID NO: 6 - protein, 102 aa, Artificial
  KERE-class Nanobody
  misc_feature (31)..(35): CDR
  misc_feature (50)..(54): CDR
  misc_feature (87)..(91): CDR
DVKFVESGGGLVQAGGSLRLSCVASGFNFDXXXXXWFRQAPGKEREEVAXXXXXRFTISSEKDKNSVYLQMNSLKPEDTALYICAGXXXXXWGRGTQVTVSS

SEQ ID NO: 7 - protein, 102 aa, Artificial
  KERE-class Nanobody
  misc_feature (31)..(35): CDR
  misc_feature (50)..(54): CDR
  misc_feature (87)..(91): CDR
QVRLAESGGGLVQSGGSLRLSCVASGSTYTXXXXXWYRQYPGKQRALVAXXXXXRFTIARDSTKDTFCLQMNNLKPEDTAVYYCYAXXXXXWGQGTQVTVSS

SEQ ID NO: 8 - protein, 102 aa, Artificial
  KERE-class Nanobody
  misc_feature (31)..(35): CDR
  misc_feature (50)..(54): CDR
  misc_feature (87)..(91): CDR
EVQLVESGGGLVQAGGSLRLSCAASGFTSDXXXXXWFRQAPGKPREGVSXXXXXRFTISTDNAKNTVHLLMNRVNAEDTALYYCAVXXXXXWGRGTRVTVSS

SEQ ID NO: 9 - protein, 102 aa, Artificial
  KERE-class Nanobody
  misc_feature (31)..(35): CDR
  misc_feature (50)..(54): CDR
  misc_feature (87)..(91): CDR
QVQLVESGGGLVQPGGSLRLSCQASGDISTXXXXXWYRQVPGKLREFVAXXXXXRFTISGDNAKRAIYLQMNNLKPDDTAVYYCNRXXXXXWGQGTQVTVSP

SEQ ID NO: 10 - protein, 102 aa, Artificial
  KERE-class Nanobody
  misc_feature (31)..(35): CDR
  misc_feature (50)..(54): CDR
  misc_feature (87)..(91): CDR
QVPVVESGGGLVQAGDSLRLFCAVPSFTSTXXXXXWFRQAPGKEREFVAXXXXXRFTISRNATKNTLTLRMDSLKPEDTAVYYCAAXXXXXWGQGTQVTVSS

SEQ ID NO: 11 - protein, 102 aa, Artificial
  KERE-class Nanobody
  misc_feature (31)..(35): CDR
  misc_feature (50)..(54): CDR
  misc_feature (87)..(91): CDR
EVQLVESGGGLVQAGDSLRLFCTVSGGTASXXXXXWFRQAPGEKREFVAXXXXXRFTIARENAGNMVYLQMNNLKPDDTALYTCAAXXXXXWGRGTQVTVSS

SEQ ID NO: 12 - protein, 102 aa, Artificial
  KERE-class Nanobody
  misc_feature (31)..(35): CDR
  misc_feature (50)..(54): CDR
  misc_feature (87)..(91): CDR
AVQLVESGGDSVQPGDSQTLSCAASGRTNSXXXXXWFRQAPGKERVFLAXXXXXRFTISRDSAKNMMYLQMNNLKPQDTAVYYCAAXXXXXWGQGTQVTVSS

SEQ ID NO: 13 - protein, 102 aa, Artificial
  KERE-class Nanobody
  misc_feature (31)..(35): CDR
  misc_feature (50)..(54): CDR
  misc_feature (87)..(91): CDR
AVQLVESGGGLVQAGGSLRLSCVVSGLTSSXXXXXWFRQTPWQERDFVAXXXXXRFTISRDNYKDTVLLEMNFLKPEDTAIYYCAAXXXXXWGQGTQVTVSS

SEQ ID NO: 14 - protein, 102 aa, Artificial
  KERE-class Nanobody
  misc_feature (31)..(35): CDR
  misc_feature (50)..(54): CDR
  misc_feature (87)..(91): CDR
AVQLVESGGGLVQAGASLRLSCATSTRTLDXXXXXWFRQAPGRDREFVAXXXXXRFTVSRDSAENTVALQMNSLKPEDTAVYYCAAXXXXXWGQGTRVTVSS

SEQ ID NO: 15 - protein, 102 aa, Artificial
  KERE-class Nanobody
  misc_feature (31)..(35): CDR
  misc_feature (50)..(54): CDR
  misc_feature (87)..(91): CDR
QVQLVESGGGLVQPGGSLRLSCTVSRLTAHXXXXXWFRQAPGKEREAVSXXXXXRFTISRDYAGNTAFLQMDSLKPEDTGVYYCATXXXXXWGQGTQVTVSS

SEQ ID NO: 16 - protein, 102 aa, Artificial
  KERE-class Nanobody
  misc_feature (31)..(35): CDR
  misc_feature (50)..(54): CDR
  misc_feature (87)..(91): CDR
EVQLVESGGELVQAGGSLKLSCTASGRNFVXXXXXWFRRAPGKEREFVAXXXXXRFTVSRDNGKNTAYLRMNSLKPEDTADYYCAVXXXXXLGSGTQVTVSS

SEQ ID NO: 17 - protein, 102 aa, Artificial
  GLEW-class Nanobody
  misc_feature (31)..(35): CDR
  misc_feature (50)..(54): CDR
  misc_feature (87)..(91): CDR
AVQLVESGGGLVQPGGSLRLSCAASGFTFSXXXXXWVRQAPGKVLEWVSXXXXXRFTISRDNAKNTLYLQMNSLKPEDTAVYYCVKXXXXXGSQGTQVTVSS

SEQ ID NO: 18 - protein, 102 aa, Artificial
  GLEW-class Nanobody
  misc_feature (31)..(35): CDR
  misc_feature (50)..(54): CDR
  misc_feature (87)..(91): CDR
EVQLVESGGGLVQPGGSLRLSCVCVSSGCTXXXXXWVRQAPGKAEEWVSXXXXXRFKISRDNAKKTLYLQMNSLGPEDTAMYYCQRXXXXXRGQGTQVTVSS

SEQ ID NO: 19 - protein, 102 aa, Artificial
  GLEW-class Nanobody
  misc_feature (31)..(35): CDR
  misc_feature (50)..(54): CDR
  misc_feature (87)..(91): CDR
EVQLVESGGGLALPGGSLTLSCVFSGSTFSXXXXXWVRHTPGKAEEWVSXXXXXRFTISRDNAKNTLYLEMNSLSPEDTAMYYCGRXXXXXRSKGIQVTVSS

SEQ ID NO: 20 - protein, 102 aa, Artificial
  P,R,S 103-class Nanobody
  misc_feature (31)..(35): CDR
  misc_feature (50)..(54): CDR
  misc_feature (87)..(91): CDR
AVQLVESGGGLVQAGGSLRLSCAASGRTFSXXXXXWFRQAPGKEREFVAXXXXXRFTISRDNAKNTVYLQMNSLKPEDTAVYYCAAXXXXXRGQGTQVTVSS

SEQ ID NO: 21 - protein, 102 aa, Artificial
  P,R,S 103-class Nanobody
  misc_feature (31)..(35): CDR
  misc_feature (50)..(54): CDR
  misc_feature (87)..(91): CDR
DVQLVESGGDLVQPGGSLRLSCAASGFSFDXXXXXWLRQTPGKGLEWVGXXXXXRFTISRDNAKNMLYLHLNNLKSEDTAVYYCRRXXXXXLGQGTQVTVSS

SEQ ID NO: 22 - protein, 102 aa, Artificial; identical to SEQ ID NO: 18
  P,R,S 103-class Nanobody
  misc_feature (31)..(35): CDR
  misc_feature (50)..(54): CDR
  misc_feature (87)..(91): CDR

SEQ ID NO: 23 - protein, 30 aa, Artificial
  KERE-class Nanobody FW1 sequence
QVQRVESGGGLVQAGGSLRLSCAASGRTSS

SEQ ID NO: 24 - protein, 30 aa, Artificial
  KERE-class Nanobody FW1 sequence
QVQLVESGGGLVQTGDSLSLSCSASGRTFS

SEQ ID NO: 25 - protein, 30 aa, Artificial
  KERE-class Nanobody FW1 sequence
QVKLEESGGGLVQAGDSLRLSCAATGRAFG

SEQ ID NO: 26 - protein, 30 aa, Artificial
  KERE-class Nanobody FW1 sequence
AVQLVESGGGLVQPGESLGLSCVASGRDFV

SEQ ID NO: 27 - protein, 30 aa, Artificial
  KERE-class Nanobody FW1 sequence
EVQLVESGGGLVQAGGSLRLSCEVLGRTAG

SEQ ID NO: 28 - protein, 30 aa, Artificial
  KERE-class Nanobody FW1 sequence
QVQLVESGGGWVQPGGSLRLSCAASETILS

SEQ ID NO: 29 - protein, 30 aa, Artificial
  KERE-class Nanobody FW1 sequence
QVQLVESGGGTVQPGGSLNLSCVASGNTFN

SEQ ID NO: 30 - protein, 30 aa, Artificial
  KERE-class Nanobody FW1 sequence
EVQLVESGGGLAQPGGSLQLSCSAPGFTLD

SEQ ID NO: 31 - protein, 30 aa, Artificial
  KERE-class Nanobody FW1 sequence
AQELEESGGGLVQAGGSLRLSCAASGRTFN

SEQ ID NO: 32 - protein, 22 aa, Artificial
  KERE-class Nanobody FW1 sequence
VESGGGLVQPGGSLRLSCAASG

SEQ ID NO: 33 - protein, 22 aa, Artificial
  KERE-class Nanobody FW1 sequence
VDSGGGLVQAGDSLKLSCALTG

SEQ ID NO: 34 - protein, 22 aa, Artificial
  KERE-class Nanobody FW1 sequence
VDSGGGLVQAGDSLRLSCAASG

SEQ ID NO: 35 - protein, 22 aa, Artificial
  KERE-class Nanobody FW1 sequence
VDSGGGLVEAGGSLRLSCQVSE

SEQ ID NO: 36 - protein, 22 aa, Artificial
  KERE-class Nanobody FW1 sequence
QDSGGGSVQAGGSLKLSCAASG

SEQ ID NO: 37 - protein, 22 aa, Artificial
  KERE-class Nanobody FW1 sequence
VQSGGRLVQAGDSLRLSCAASE

SEQ ID NO: 38 - protein, 22 aa, Artificial
  KERE-class Nanobody FW1 sequence
VESGGTLVQSGDSLKLSCASST

SEQ ID NO: 39 - protein, 22 aa, Artificial
  KERE-class Nanobody FW1 sequence
MESGGDSVQSGGSLTLSCVASG

SEQ ID NO: 40 - protein, 22 aa, Artificial
  KERE-class Nanobody FW1 sequence
QASGGGLVQAGGSLRLSCSASV

SEQ ID NO: 41 - protein, 14 aa, Artificial
  KERE-class Nanobody FW2 sequence
WFRQAPGKEREFVA

SEQ ID NO: 42 - protein, 14 aa, Artificial
  KERE-class Nanobody FW2 sequence
WFRQTPGREREFVA

SEQ ID NO: 43 - protein, 14 aa, Artificial
  KERE-class Nanobody FW2 sequence
WYRQAPGKQREMVA

SEQ ID NO: 44 - protein, 14 aa, Artificial
  KERE-class Nanobody FW2 sequence
WYRQGPGKQRELVA

SEQ ID NO: 45 - protein, 14 aa, Artificial
  KERE-class Nanobody FW2 sequence
WIRQAPGKEREGVS

SEQ ID NO: 46 - protein, 14 aa, Artificial
  KERE-class Nanobody FW2 sequence
WFREAPGKEREGIS

SEQ ID NO: 47 - protein, 14 aa, Artificial
  KERE-class Nanobody FW2 sequence
WYRQAPGKERDLVA

SEQ ID NO: 48 - protein, 14 aa, Artificial
  KERE-class Nanobody FW2 sequence
WFRQAPGKQREEVS

SEQ ID NO: 49 - protein, 14 aa, Artificial
  KERE-class Nanobody FW2 sequence
WFRQPPGKVREFVG

SEQ ID NO: 50 - protein, 32 aa, Artificial
  KERE-class Nanobody FW3 sequence
RFTISRDNAKNTVYLQMNSLKPEDTAVYRCYF

SEQ ID NO: 51 - protein, 32 aa, Artificial
  KERE-class Nanobody FW3 sequence
RFAISRDNNKNTGYLQMNSLEPEDTAVYYCAA

SEQ ID NO: 52 - protein, 32 aa, Artificial
  KERE-class Nanobody FW3 sequence
RFTVARNNAKNTVNLEMNSLKPEDTAVYYCAA

SEQ ID NO: 53 - protein, 32 aa, Artificial
  KERE-class Nanobody FW3 sequence
RFTISRDIAKNTVDLLMNNLEPEDTAVYYCAA

SEQ ID NO: 54 - protein, 32 aa, Artificial
  KERE-class Nanobody FW3 sequence
RLTISRDNAVDTMYLQMNSLKPEDTAVYYCAA

SEQ ID NO: 55 - protein, 32 aa, Artificial
  KERE-class Nanobody FW3 sequence
RFTISRDNAKNTVYLQMDNVKPEDTAIYYCAA

SEQ ID NO: 56 - protein, 32 aa, Artificial
  KERE-class Nanobody FW3 sequence
RFTISKDSGKNTVYLQMTSLKPEDTAVYYCAT

SEQ ID NO: 57 - protein, 32 aa, Artificial
  KERE-class Nanobody FW3 sequence
RFTISRDSAKNMMYLQMNNLKPQDTAVYYCAA

SEQ ID NO: 58 - protein, 32 aa, Artificial
  KERE-class Nanobody FW3 sequence
RFTISRENDKSTVYLQLNSLKPEDTAVYYCAA

SEQ ID NO: 59 - protein, 32 aa, Artificial
  KERE-class Nanobody FW3 sequence
RFTISRDYAGNTAYLQMNSLKPEDTGVYYCAT

SEQ ID NO: 60 - protein, 11 aa, Artificial
  KERE-class Nanobody FW4 sequence
WGQGTQVTVSS

SEQ ID NO: 61 - protein, 11 aa, Artificial
  KERE-class Nanobody FW4 sequence
WGKGTLVTVSS

SEQ ID NO: 62 - protein, 11 aa, Artificial
  KERE-class Nanobody FW4 sequence
RGQGTRVTVSS

SEQ ID NO: 63 - protein, 11 aa, Artificial
  KERE-class Nanobody FW4 sequence
WGLGTQVTISS

SEQ ID NO: 64 - protein, 30 aa, Artificial
  GLEW-class Nanobody FW1 sequence
QVQLVESGGGLVQPGGSLRLSCAASGFTFS

SEQ ID NO: 65 - protein, 30 aa, Artificial
  GLEW-class Nanobody FW1 sequence
EVHLVESGGGLVRPGGSLRLSCAAFGFIFK

SEQ ID NO: 66 - protein, 30 aa, Artificial
  GLEW-class Nanobody FW1 sequence
QVKLEESGGGLAQPGGSLRLSCVASGFTFS

SEQ ID NO: 67 - protein, 30 aa, Artificial
  GLEW-class Nanobody FW1 sequence
EVQLVESGGGLVQPGGSLRLSCVCVSSGCT

SEQ ID NO: 68 - protein, 30 aa, Artificial
  GLEW-class Nanobody FW1 sequence
EVQLVESGGGLALPGGSLTLSCVFSGSTFS

SEQ ID NO: 69 - protein, 22 aa, Artificial
  GLEW-class Nanobody FW1 sequence
VESGGGLVQPGGSLRLSCAASG

SEQ ID NO: 70 - protein, 22 aa, Artificial
  GLEW-class Nanobody FW1 sequence
EESGGGLAQPGGSLRLSCVASG

SEQ ID NO: 71 - protein, 22 aa, Artificial
  GLEW-class Nanobody FW1 sequence
VESGGGLALPGGSLTLSCVFSG

SEQ ID NO: 72 - protein, 14 aa, Artificial
  GLEW-class Nanobody FW2 sequence
WVRQAPGKVLEWVS

SEQ ID NO: 73 - protein, 14 aa, Artificial
  GLEW-class Nanobody FW2 sequence
WVRRPPGKGLEWVS

SEQ ID NO: 74 - protein, 14 aa, Artificial
  GLEW-class Nanobody FW2 sequence
WVRQAPGMGLEWVS

SEQ ID NO: 75 - protein, 14 aa, Artificial
  GLEW-class Nanobody FW2 sequence
WVRQAPGKEPEWVS

SEQ ID NO: 76 - protein, 14 aa, Artificial
  GLEW-class Nanobody FW2 sequence
WVRQAPGKDQEWVS

SEQ ID NO: 77 - protein, 14 aa, Artificial
  GLEW-class Nanobody FW2 sequence
WVRQAPGKAEEWVS

SEQ ID NO: 78 - protein, 14 aa, Artificial
  GLEW-class Nanobody FW2 sequence
WVRQAPGKGLEWVA

SEQ ID NO: 79 - protein, 14 aa, Artificial
  GLEW-class Nanobody FW2 sequence
WVRQAPGRATEWVS

SEQ ID NO: 80 - protein, 32 aa, Artificial
  GLEW-class Nanobody FW3 sequence
RFTISRDNAKNTLYLQMNSLKPEDTAVYYCVK

SEQ ID NO: 81 - protein, 32 aa, Artificial
  GLEW-class Nanobody FW3 sequence
RFTISRDNARNTLYLQMDSLIPEDTALYYCAR

SEQ ID NO: 82 - protein, 32 aa, Artificial
  GLEW-class Nanobody FW3 sequence
RFTSSRDNAKSTLYLQMNDLKPEDTALYYCAR

SEQ ID NO: 83 - protein, 32 aa, Artificial
  GLEW-class Nanobody FW3 sequence
RFIISRDNAKNTLYLQMNSLGPEDTAMYYCQR

SEQ ID NO: 84 - protein, 32 aa, Artificial
  GLEW-class Nanobody FW3 sequence
RFTASRDNAKNTLYLQMNSLKSEDTARYYCAR

SEQ ID NO: 85 - protein, 32 aa, Artificial
  GLEW-class Nanobody FW3 sequence
RFTISRDNAKNTLYLQMDDLQSEDTAMYYCGR

SEQ ID NO: 86 - protein, 11 aa, Artificial
  GLEW-class Nanobody FW4 sequence
GSQGTQVTVSS

SEQ ID NO: 87 - protein, 11 aa, Artificial
  GLEW-class Nanobody FW4 sequence
LRGGTQVTVSS

SEQ ID NO: 88 - protein, 11 aa, Artificial
  GLEW-class Nanobody FW4 sequence
RGQGTLVTVSS

SEQ ID NO: 89 - protein, 11 aa, Artificial
  GLEW-class Nanobody FW4 sequence
RSRGIQVTVSS

SEQ ID NO: 90 - protein, 11 aa, Artificial
  GLEW-class Nanobody FW4 sequence
WGKGTQVTVSS

SEQ ID NO: 91 - protein, 11 aa, Artificial
  GLEW-class Nanobody FW4 sequence
WGQGTQVTVSS

SEQ ID NO: 92 - protein, 30 aa, Artificial
  P,R,S 103-class Nanobody FW1 sequence
AVQLVESGGGLVQAGGSLRLSCAASGRTFS

SEQ ID NO: 93 - protein, 30 aa, Artificial
  P,R,S 103-class Nanobody FW1 sequence
QVQLQESGGGMVQPGGSLRLSCAASGFDFG

SEQ ID NO: 94 - protein, 30 aa, Artificial; identical to SEQ ID NO: 65
  P,R,S 103-class Nanobody FW1 sequence

SEQ ID NO: 95 - protein, 30 aa, Artificial
  P,R,S 103-class Nanobody FW1 sequence
QVQLAESGGGLVQPGGSLKLSCAASRTIVS

SEQ ID NO: 96 - protein, 30 aa, Artificial
  P,R,S 103-class Nanobody FW1 sequence
QEHLVESGGGLVDIGGSLRLSCAASERIFS

SEQ ID NO: 97 - protein, 30 aa, Artificial; identical to SEQ ID NO: 66
  P,R,S 103-class Nanobody FW1 sequence

SEQ ID NO: 98 - protein, 30 aa, Artificial; identical to SEQ ID NO: 67
  P,R,S 103-class Nanobody FW1 sequence

SEQ ID NO: 99 - protein, 30 aa, Artificial; identical to SEQ ID NO: 68
  P,R,S 103-class Nanobody FW1 sequence

SEQ ID NO: 100 - protein, 22 aa, Artificial
  P,R,S 103-class Nanobody FW1 sequence
VESGGGLVQAGGSLRLSCAASG

SEQ ID NO: 101 - protein, 22 aa, Artificial
  P,R,S 103-class Nanobody FW1 sequence
AESGGGLVQPGGSLKLSCAASR

SEQ ID NO: 102 - protein, 14 aa, Artificial
  P,R,S 103-class Nanobody FW2 sequence
WFRQAPGKEREFVA

SEQ ID NO: 103 - protein, 14 aa, Artificial
  P,R,S 103-class Nanobody FW2 sequence
WVRQAPGKVLEWVS

SEQ ID NO: 104 - protein, 14 aa, Artificial
  P,R,S 103-class Nanobody FW2 sequence
WVRRPPGKGLEWVS

SEQ ID NO: 105 - protein, 14 aa, Artificial
  P,R,S 103-class Nanobody FW2 sequence
WIRQAPGKEREGVS

SEQ ID NO: 106 - protein, 14 aa, Artificial
  P,R,S 103-class Nanobody FW2 sequence
WVRQYPGKEPEWVS

SEQ ID NO: 107 - protein, 14 aa, Artificial
  P,R,S 103-class Nanobody FW2 sequence
WFRQPPGKEHEFVA

SEQ ID NO: 108 - protein, 14 aa, Artificial
  P,R,S 103-class Nanobody FW2 sequence
WYRQAPGKRTELVA

SEQ ID NO: 109 - protein, 14 aa, Artificial
  P,R,S 103-class Nanobody FW2 sequence
WLRQAPGQGLEWVS

SEQ ID NO: 110 - protein, 14 aa, Artificial
  P,R,S 103-class Nanobody FW2 sequence
WLRQTPGKGLEWVG

SEQ ID NO: 111 - protein, 14 aa, Artificial
  P,R,S 103-class Nanobody FW2 sequence
WVRQAPGKAEEFVS

SEQ ID NO: 112 - protein, 32 aa, Artificial
  P,R,S 103-class Nanobody FW3 sequence
RFTISRDNAKNTVYLQMNSLKPEDTAVYYCAA

SEQ ID NO: 113 - protein, 32 aa, Artificial; identical to SEQ ID NO: 81
  P,R,S 103-class Nanobody FW3 sequence

SEQ ID NO: 114 - protein, 32 aa, Artificial
  P,R,S 103-class Nanobody FW3 sequence
RFTISRDNAKNEMYLQMNNLKTEDTGVYWCGA

SEQ ID NO: 115 - protein, 32 aa, Artificial
  P,R,S 103-class Nanobody FW3 sequence
RFTISSDSNRNMIYLQMNNLKPEDTAVYYCAA

SEQ ID NO: 116 - protein, 32 aa, Artificial
  P,R,S 103-class Nanobody FW3 sequence
RFTISRDNAKNMLYLHLNNLKSEDTAVYYCRR

SEQ ID NO: 117 - protein, 32 aa, Artificial
  P,R,S 103-class Nanobody FW3 sequence
RFTISRDNAKKTVYLRLNSLNPEDTAVYSCNL

SEQ ID NO: 118 - protein, 32 aa, Artificial
  P,R,S 103-class Nanobody FW3 sequence
RFKISRDNAKKTLYLQMNSLGPEDTAMYYCQR

SEQ ID NO: 119 - protein, 32 aa, Artificial
  P,R,S 103-class Nanobody FW3 sequence
RFTVSRDNGKNTAYLRMNSLKPEDTADYYCAV

SEQ ID NO: 120 - protein, 11 aa, Artificial
  P,R,S 103-class Nanobody FW4 sequence
RGQGTQVTVSS

SEQ ID NO: 121 - protein, 11 aa, Artificial
  P,R,S 103-class Nanobody FW4 sequence
LRGGTQVTVSS

SEQ ID NO: 122 - protein, 11 aa, Artificial
  P,R,S 103-class Nanobody FW4 sequence
GNKGTLVTVSS

SEQ ID NO: 123 - protein, 11 aa, Artificial
  P,R,S 103-class Nanobody FW4 sequence
SSPGTQVTVSS

SEQ ID NO: 124 - protein, 11 aa, Artificial
  P,R,S 103-class Nanobody FW4 sequence
SSQGTLVTVSS

SEQ ID NO: 125 - protein, 11 aa, Artificial
  P,R,S 103-class Nanobody FW4 sequence
RSRGIQVTVSS

SEQ ID NO: 126 - protein, 30 aa, Artificial
  framework sequence
EVQLVESGGGLVQAGGSLRLSCAASGSIFN

SEQ ID NO: 127 - protein, 30 aa, Artificial
  framework sequence
RGAAGGVWGGLVQAGGSLRLSCAASGSIFN

SEQ ID NO: 128 - protein, 30 aa, Artificial; identical to SEQ ID NO: 126
  framework sequence

SEQ ID NO: 129 - protein, 30 aa, Artificial; identical to SEQ ID NO: 126
  framework sequence

SEQ ID NO: 130 - protein, 30 aa, Artificial; identical to SEQ ID NO: 126
  framework sequence

SEQ ID NO: 131 - protein, 30 aa, Artificial
  framework sequence
EVQLVESGGGLVQAGGSLRVSCAASGSIFA

SEQ ID NO: 132 - protein, 30 aa, Artificial; identical to SEQ ID NO: 126
  framework sequence

SEQ ID NO: 133 - protein, 30 aa, Artificial; identical to SEQ ID NO: 126
  framework sequence

SEQ ID NO: 134 - protein, 30 aa, Artificial
  framework sequence
EVQLVESGGGLVQAGGSLRLSCAASGRIFS

SEQ ID NO: 135 - protein, 30 aa, Artificial
  framework sequence
EVQLVESGGGLVQAGGSLRLSCAASGSIFS

SEQ ID NO: 136 - protein, 30 aa, Artificial
  framework sequence
EVQLVESGGGLVQPGGSLRLSCAGSGSILR

SEQ ID NO: 137 - protein, 30 aa, Artificial
  framework sequence
EVQLVESGGGLVQAGGSLTLSCAASVRTFS

SEQ ID NO: 138 - protein, 30 aa, Artificial
  framework sequence
EVQLVESGGGLVQAGGSLTLSCAVSGLTFN

SEQ ID NO: 139 - protein, 30 aa, Artificial
  framework sequence
EVQLVESGGGLVQAGGSLRLSCAASGRTSS

SEQ ID NO: 140 - protein, 30 aa, Artificial
  framework sequence
EVQLVESGGGLVQAGDSLKLSCAASGRTSS

SEQ ID NO: 141 - protein, 30 aa, Artificial
  framework sequence
EVQLVESGGGLVQAGASLRLSCAASGRSFD

SEQ ID NO: 142 - protein, 30 aa, Artificial
  framework sequence
EVQLVESGGGLVQPGGSLRLSCAASGFTFS

SEQ ID NO: 143 - protein, 30 aa, Artificial
  framework sequence
EVQLVESGGGLVQAGGSLRLSCAASGSISE

SEQ ID NO: 144 - protein, 30 aa, Artificial
  framework sequence
EVQLVESGGGLVQAGGSLRLSCAASGRTFS

SEQ ID NO: 145 - protein, 30 aa, Artificial
  framework sequence
EVQLVESGGGLVQAGGSLRLSCSASGRTFS

SEQ ID NO: 146 - protein, 30 aa, Artificial
  framework sequence
EVQLVESGGGLVQAGGSLELSCSASGGTLR

SEQ ID NO: 147 - protein, 30 aa, Artificial
  framework sequence
EVQLVESGGGLVQAGGSLRLSCAASGTISS

SEQ ID NO: 148 - protein, 30 aa, Artificial; identical to SEQ ID NO: 147
  framework sequence

SEQ ID NO: 149 - protein, 30 aa, Artificial; identical to SEQ ID NO: 147
  framework sequence

SEQ ID NO: 150 - protein, 30 aa, Artificial
  framework sequence
EVQLVESGGGLVQAGGSLRLSCVASGTISA

SEQ ID NO: 151 - protein, 30 aa, Artificial; identical to SEQ ID NO: 147
  framework sequence

SEQ ID NO: 152 - protein, 30 aa, Artificial; identical to SEQ ID NO: 147
  framework sequence

SEQ ID NO: 153 - protein, 30 aa, Artificial; identical to SEQ ID NO: 147
  framework sequence

SEQ ID NO: 154 - protein, 30 aa, Artificial; identical to SEQ ID NO: 147
  framework sequence

SEQ ID NO: 155 - protein, 30 aa, Artificial; identical to SEQ ID NO: 147
  framework sequence

SEQ ID NO: 156 - protein, 30 aa, Artificial; identical to SEQ ID NO: 147
  framework sequence

SEQ ID NO: 157 - protein, 30 aa, Artificial; identical to SEQ ID NO: 147
  framework sequence

SEQ ID NO: 158 - protein, 30 aa, Artificial; identical to SEQ ID NO: 147
  framework sequence

SEQ ID NO: 159 - protein, 30 aa, Artificial; identical to SEQ ID NO: 147
  framework sequence

SEQ ID NO: 160 - protein, 30 aa, Artificial
  framework sequence
EVQLVESGGGLVQAGGSLRLSCAASGAISS

SEQ ID NO: 161 - protein, 30 aa, Artificial
  framework sequence
EVQLVESGGGLVQPGGSLRLSCAASGRPVG

SEQ ID NO: 162 - protein, 30 aa, Artificial
  framework sequence
EVQLVESGGGLVQPGGSLRLSCAASGRTFG

SEQ ID NO: 163 - protein, 30 aa, Artificial
  framework sequence
EVQLVESGGGLVQAGSSLRLSCAASGRTFS

SEQ ID NO: 164 - protein, 30 aa, Artificial
  framework sequence
EVQLVESGGGWVQAGSSLRLSCAASGRTFS

SEQ ID NO: 165 - protein, 30 aa, Artificial
  framework sequence
EVQLVESGGGLVQAGGSLRLSCIASGLPFS

SEQ ID NO: 166 - protein, 30 aa, Artificial
  framework sequence
EVQLVESGGGLVQPGGSLRLSCIASGLPFS

SEQ ID NO: 167 - protein, 30 aa, Artificial
  framework sequence
QVQLVESGGGLVQPGGSLRLSCAASGFTLA

SEQ ID NO: 168 - protein, 30 aa, Artificial
  framework sequence
EVQLVESGGGLVQPGGSLRLSCAASGFTLD

SEQ ID NO: 169 - protein, 30 aa, Artificial; identical to SEQ ID NO: 168
  framework sequence

SEQ ID NO: 170 - protein, 30 aa, Artificial
  framework sequence
EVQLVESRGGLVQPGGSLRLSCAASGFYLD

SEQ ID NO: 171 - protein, 30 aa, Artificial
  framework sequence
EVQLVESGGGLVQPGGSLRLSCAASGFYLD

SEQ ID NO: 172 - protein, 30 aa, Artificial
  framework sequence
EVQLVESGGGLVQAGGSLRLSCAASGRTLS

SEQ ID NO: 173 - protein, 30 aa, Artificial; identical to SEQ ID NO: 172
  framework sequence

SEQ ID NO: 174 - protein, 30 aa, Artificial
  framework sequence
EVQLVESEGGLVQPGGSLRLSCAASGFAFS

SEQ ID NO: 175 - protein, 30 aa, Artificial; identical to SEQ ID NO: 142
  framework sequence

SEQ ID NO: 176 - protein, 30 aa, Artificial
  framework sequence
EVQLVESGGGLVQAGGSLRLSCAASGRTFE

SEQ ID NO: 177 - protein, 30 aa, Artificial
  framework sequence
EVQLVESGGGLVQAGGSLRLSCAASGRTFD

SEQ ID NO: 178 - protein, 30 aa, Artificial
  framework sequence
EVQLVESGGRLVQAGGSLRLSCAASGRTFD

SEQ ID NO: 179 - protein, 30 aa, Artificial; identical to SEQ ID NO: 142
  framework sequence

SEQ ID NO: 180 - protein, 30 aa, Artificial
  framework sequence
EVQLMESGGGLVQAGGSLRLSCAAPGRTFS

SEQ ID NO: 181 - protein, 30 aa, Artificial
  framework sequence
  misc_feature (3)..(3): Unknown amino acid, most likely one of the Camelid amino acid residues mentioned for this specific position in Tables A-5 to A-8.
EVXLVESGGGLVEPGGSLRLSCAASGFTFS

SEQ ID NO: 182 - protein, 30 aa, Artificial
  framework sequence
EVQLVESGGGLVQAGGSLRLSCVASGRTFN

SEQ ID NO: 183 - protein, 30 aa, Artificial
  framework sequence
EVQLVESGGGLVQAGGSLRLSCVASGRAFN

SEQ ID NO: 184 - protein, 30 aa, Artificial
  framework sequence
EVQLVESGGGLVQPGGSLRLSCAASGFSIS

SEQ ID NO: 185 - protein, 30 aa, Artificial
  framework sequence
EVQLVESRGGLVQPGGSLRLSCAASGFTFS

SEQ ID NO: 186 - protein, 30 aa, Artificial
  framework sequence
EVQLVESGGGLVQPGGSLRLSCAASGFAFS

SEQ ID NO: 187 - protein, 30 aa, Artificial
  framework sequence
EVQLVESGGGLVQPGGSLRLSCAASGFAIT

SEQ ID NO: 188 - protein, 30 aa, Artificial
  framework sequence
EVQLVESGGGLVQAGESLKLSCAASGRPFS

SEQ ID NO: 189 - protein, 30 aa, Artificial
  framework sequence
EVQLVESGGGVVQAGESLRLSCAASGRSFS

SEQ ID NO: 190 - protein, 30 aa, Artificial; identical to SEQ ID NO: 168
  framework sequence

SEQ ID NO: 191 - protein, 30 aa, Artificial
  framework sequence
EVQLVESGGGLVQAGDSLRLSCTASGRTFS

SEQ ID NO: 192 - protein, 30 aa, Artificial
  framework sequence
EVQLVESGGGVVQAGESLRLSCAASGGSFS

SEQ ID NO: 193 - protein, 30 aa, Artificial
  framework sequence
  misc_feature (19)..(19): Unknown amino acid, most likely one of the Camelid amino acid residues mentioned for this specific position in Tables A5 to A-8.
EVQLVESGGGLVQAGGSLXLSCAASGRTFS

SEQ ID NO: 194 - protein, 30 aa, Artificial; identical to SEQ ID NO: 144
  framework sequence

SEQ ID NO: 195 - protein, 30 aa, Artificial
  framework sequence
EVQLVESGGGLVQPGGSLRLSCAASGFTLS

SEQ ID NO: 196 - protein, 30 aa, Artificial
  framework sequence
EVQLVESGGGLVQPGGSLRLSCAASGRTFS

SEQ ID NO: 197 - protein, 30 aa, Artificial
  framework sequence
EVQLVESGGGLVQAGGSLRLSCAASGGTFG

SEQ ID NO: 198 - protein, 30 aa, Artificial
  framework sequence
EVQLVESGGGLVQTGGSLRLSCAASVINFR

SEQ ID NO: 199 - protein, 30 aa, Artificial
  framework sequence
EVQLVESGGGLVQPGGSLRLSCAASGRFFS

SEQ ID NO: 200 - protein, 30 aa, Artificial
  framework sequence
EVQLVESGGGSVQAGGSLRLSCAASGQITF

SEQ ID NO: 201 - protein, 30 aa, Artificial
  framework sequence
EVQLVESGGGVVRAGESLRLSCAASGRSFS

SEQ ID NO: 202 - protein, 30 aa, Artificial
  framework sequence
RGALVESGGGLVQAGGSLRLSCAASGRPFS

SEQ ID NO: 203 - protein, 30 aa, Artificial; identical to SEQ ID NO: 142
  framework sequence

SEQ ID NO: 204 - protein, 30 aa, Artificial
  framework sequence
EVQLVESGGGLVQAGGSLRLSCAASGLTFS

SEQ ID NO: 205 - protein, 30 aa, Artificial; identical to SEQ ID NO: 189
  framework sequence

SEQ ID NO: 206 - protein, 30 aa, Artificial; identical to SEQ ID NO: 189
  framework sequence

SEQ ID NO: 207 - protein, 30 aa, Artificial
  framework sequence
EVQLVESGGGLVQAGGSRRVSCAASGLTFS

SEQ ID NO: 208 - protein, 30 aa, Artificial
  framework sequence
EVQLVESGGGLVQAGGSLRLSCEASERTFS

SEQ ID NO: 209 - protein, 30 aa, Artificial; identical to SEQ ID NO: 144
  framework sequence

SEQ ID NO: 210 - protein, 30 aa, Artificial; identical to SEQ ID NO: 168
  framework sequence

SEQ ID NO: 211 - protein, 30 aa, Artificial
  framework sequence
EVQLVESGGGLVQPGGSLRLSCAASGSFFS

SEQ ID NO: 212 - protein, 30 aa, Artificial; identical to SEQ ID NO: 199
  framework sequence

SEQ ID NO: 213 - protein, 30 aa, Artificial
  framework sequence
EVQLVESGGGLVQSGDPLRLSCAASGPTYT

SEQ ID NO: 214 - protein, 30 aa, Artificial
  framework sequence
KVQLVESGGGLVQAGGSLRLSCAASGRSFS

SEQ ID NO: 215 - protein, 30 aa, Artificial
  framework sequence
EVQLVESGGGSVQAGGSLRLSCAASGRTIF

SEQ ID NO: 216 - protein, 30 aa, Artificial; identical to SEQ ID NO: 144
  framework sequence

SEQ ID NO: 217 - protein, 30 aa, Artificial
  framework sequence
EVQLVESGGGVVQAGESLRLSCAASGRIFS

SEQ ID NO: 218 - protein, 30 aa, Artificial
  framework sequence
EVQLVESGGGLVQPGGSLRLSCAASGFNFS

SEQ ID NO: 219 - protein, 30 aa, Artificial
  framework sequence
EVQLVESGGGLVQAGGSLRLSCAASGIIFS

SEQ ID NO: 220 - protein, 30 aa, Artificial; identical to SEQ ID NO: 142
  framework sequence

SEQ ID NO: 221 - protein, 30 aa, Artificial
  framework sequence
EVQLVESGGGVVQAGESLRLSCAASGYNVK

SEQ ID NO: 222 - protein, 30 aa, Artificial
  framework sequence
EVQLVESGGGLVQAGDSLRLSCAASGRSFS

SEQ ID NO: 223 - protein, 30 aa, Artificial
  framework sequence
EVQLVESGGGLVQAGVSLRLSCAASGRAFS

SEQ ID NO: 224 - protein, 30 aa, Artificial; identical to SEQ ID NO: 64
  framework sequence

SEQ ID NO: 225 - protein, 30 aa, Artificial; identical to SEQ ID NO: 189
  framework sequence

SEQ ID NO: 226 - protein, 30 aa, Artificial
  framework sequence
EVQLVESGGGAVQAGESLRLSCAASGRSFS

SEQ ID NO: 227 - protein, 30 aa, Artificial; identical to SEQ ID NO: 184
  framework sequence

SEQ ID NO: 228 - protein, 30 aa, Artificial
  framework sequence
EVQLVESGGGMVQAGGSLRLSCTASGLTDN

SEQ ID NO: 229 - protein, 30 aa, Artificial; identical to SEQ ID NO: 144
  framework sequence

SEQ ID NO: 230 - protein, 30 aa, Artificial; identical to SEQ ID NO: 189
  framework sequence

SEQ ID NO: 231 - protein, 30 aa, Artificial; identical to SEQ ID NO: 189
  framework sequence

SEQ ID NO: 232 - protein, 30 aa, Artificial; identical to SEQ ID NO: 189
  framework sequence

SEQ ID NO: 233 - protein, 30 aa, Artificial; identical to SEQ ID NO: 189
  framework sequence

SEQ ID NO: 234 - protein, 30 aa, Artificial; identical to SEQ ID NO: 186
  framework sequence

SEQ ID NO: 235 - protein, 30 aa, Artificial; identical to SEQ ID NO: 189
  framework sequence

SEQ ID NO: 236 - protein, 30 aa, Artificial; identical to SEQ ID NO: 142
  framework sequence

SEQ ID NO: 237 - protein, 30 aa, Artificial
  framework sequence
EVQLVESGGGVVQAGESLRLSCAASGRSLN

SEQ ID NO: 238 - protein, 30 aa, Artificial
  framework sequence
  misc_feature (3)..(3): Unknown amino acid, most likely one of the Camelid amino acid residues mentioned for this specific position in Tables A-5 to A-8.
EVXLVESGGGVVQAGESLRLSCAASGRSFS

SEQ ID NO: 239 - protein, 30 aa, Artificial
  framework sequence
EMQLVESGGGLVQPGGSLRLSCAASGFSIS

SEQ ID NO: 240 - protein, 30 aa, Artificial; identical to SEQ ID NO: 207
  framework sequence

SEQ ID NO: 241 - protein, 30 aa, Artificial; identical to SEQ ID NO: 142
  framework sequence

SEQ ID NO: 242 - protein, 30 aa, Artificial
  framework sequence
EVQLVESGGGLVQAGGSLRLSCAASGGTFS

SEQ ID NO: 243 - protein, 29 aa, Artificial
  framework sequence
EVQLVESGGGLVQPGGSLRLSCVASGSIF

SEQ ID NO: 244 - protein, 30 aa, Artificial; identical to SEQ ID NO: 168
  framework sequence

SEQ ID NO: 245 - protein, 30 aa, Artificial
  framework sequence
  misc_feature (3)..(3): Unknown amino acid, most likely one of the Camelid amino acid residues mentioned for this specific position in Tables A-5 to A-8.
EVXLVESGGGSVQAGGSLGLSCTASEGTFS

SEQ ID NO: 246 - protein, 30 aa, Artificial
  framework sequence
EVQLVESGGGLVRAGGSLRLSCAASGRAFS

SEQ ID NO: 247 - protein, 30 aa, Artificial
  framework sequence
EVQLVESGGGFVQPGGSLRLSCAASASIFS

SEQ ID NO: 248 - protein, 30 aa, Artificial
  framework sequence
EVQLVESGGGFAQPGGSLRLSCAASASIFS

SEQ ID NO: 249 - protein, 30 aa, Artificial; identical to SEQ ID NO: 247
  framework sequence

SEQ ID NO: 250 - protein, 30 aa, Artificial
  framework sequence
EVQLVESGGGLVQPGGSLRLTCAASGSIAS

SEQ ID NO: 251 - protein, 30 aa, Artificial
  framework sequence
EVQLVESGGGLVQPGGSLRLPCVASGSIFR

SEQ ID NO: 252 - protein, 30 aa, Artificial
  framework sequence
EVQLVESGGGLVQPGGSPRLSCVASGSIFR

SEQ ID NO: 253 - protein, 30 aa, Artificial
  framework sequence
  misc_feature (19)..(19): Unknown amino acid, most likely one of the Camelid amino acid residues mentioned for this specific position in Tables A-5 to A-8.
EVQLVESGGGFVQPGGSLXLSCAASASIFS

SEQ ID NO: 254 - protein, 30 aa, Artificial; identical to SEQ ID NO: 247
  framework sequence

SEQ ID NO: 255 - protein, 30 aa, Artificial
  framework sequence
  misc_feature (3)..(3): Unknown amino acid, most likely one of the Camelid amino acid residues mentioned for this specific position in Tables A-5 to A-8.
EVXLVESGGGFVQPGGSLRLSCAASASIFS

SEQ ID NO: 256 - protein, 30 aa, Artificial; identical to SEQ ID NO: 253
  framework sequence
  misc_feature (19)..(19): Unknown amino acid, most likely one of the Camelid amino acid residues mentioned for this specific position in Tables A-5 to A-8.

SEQ ID NO: 257 - protein, 30 aa, Artificial; identical to SEQ ID NO: 247
  framework sequence

SEQ ID NO: 258 - protein, 30 aa, Artificial
  framework sequence
EVQLVESGGGLVQAGGSLRLSCAASIRTFS

SEQ ID NO: 259 - protein, 30 aa, Artificial; identical to SEQ ID NO: 238
  framework sequence
  misc_feature (3)..(3): Unknown amino acid, most likely one of the Camelid amino acid residues mentioned for this specific position in Tables A-5 to A-8.

SEQ ID NO: 260 - protein, 30 aa, Artificial
  framework sequence
  misc_feature (13)..(13): Unknown amino acid, most likely one of the Camelid amino acid residues mentioned for this specific position in Tables A-5 to A-8.
EVQLVESGGGLVXPGGSLRLSCVASGFPFS

SEQ ID NO: 261 - protein, 30 aa, Artificial; identical to SEQ ID NO: 168
  framework sequence

SEQ ID NO: 262 - protein, 30 aa, Artificial; identical to SEQ ID NO: 168
  framework sequence

SEQ ID NO: 263 - protein, 30 aa, Artificial
  framework sequence
EVQLVESGGGLVQPGGSLRISCAASGFTLD

SEQ ID NO: 264 - protein, 30 aa, Artificial; identical to SEQ ID NO: 189
  framework sequence

SEQ ID NO: 265 - protein, 30 aa, Artificial; identical to SEQ ID NO: 168
  framework sequence

SEQ ID NO: 266 - protein, 30 aa, Artificial
  framework sequence
  misc_feature (3)..(3): Unknown amino acid, most likely one of the Camelid amino acid residues mentioned for this specific position in Tables A-5 to A-8.
EVXLVESGGGVVQAGESLRLSCSASGRSFS

SEQ ID NO: 267 - protein, 30 aa, Artificial
  framework sequence
EVQLVESGGGLVQAGGSLRLSCAASGPLFE

SEQ ID NO: 268 - protein, 30 aa, Artificial
  framework sequence
EVQLVESGGGLVQPGGSLRLSCTASGLTFS

SEQ ID NO: 269 - protein, 30 aa, Artificial; identical to SEQ ID NO: 211
  framework sequence

SEQ ID NO: 270 - protein, 30 aa, Artificial
  framework sequence
EVQLVESGGGLVQPGSSLRLSCAASGFTLD

SEQ ID NO: 271 - protein, 30 aa, Artificial
  framework sequence
EVQLVESGGGLVQAGGSLRLACAASGLAFS

SEQ ID NO: 272 - protein, 30 aa, Artificial; identical to SEQ ID NO: 142
  framework sequence

SEQ ID NO: 273 - protein, 30 aa, Artificial; identical to SEQ ID NO: 144
  framework sequence

SEQ ID NO: 274 - protein, 30 aa, Artificial
  framework sequence
EVQLVESGGGLVQAGGSLRLSCAASGFTFD

SEQ ID NO: 275 - protein, 30 aa, Artificial
  framework sequence
EVQLVESGGGLVQVGGSLRLSCAASEGTFN

SEQ ID NO: 276 - protein, 30 aa, Artificial
  framework sequence
EVQLVESGGGLVQAGDSLRLSCAASGRAFS

SEQ ID NO: 277 - protein, 30 aa, Artificial
  framework sequence
EVQLVESGGGLVQAGGSLRLSCAASGFTLD

SEQ ID NO: 278 - protein, 30 aa, Artificial; identical to SEQ ID NO: 204
  framework sequence

SEQ ID NO: 279 - protein, 30 aa, Artificial
  framework sequence
EVQLVESGGGLVQPGGSLTLSCAASGFTLD

SEQ ID NO: 280 - protein, 30 aa, Artificial; identical to SEQ ID NO: 144
  framework sequence

SEQ ID NO: 281 - protein, 30 aa, Artificial
  framework sequence
EVQLVESGGGLVQAGGSLRLSCAASGGTVT

SEQ ID NO: 282 - protein, 30 aa, Artificial
  framework sequence
EVQLVESGGGLVQVGGSLRLSCAASEHTFN

SEQ ID NO: 283 - protein, 30 aa, Artificial
  framework sequence
EVQLVESGGGLVQAGGSLELSCVASGLTFD

SEQ ID NO: 284 - protein, 30 aa, Artificial
  framework sequence
EVQLVESGGGLVQAGDSLRLSCAASGRTLA

SEQ ID NO: 285 - protein, 30 aa, Artificial; identical to SEQ ID NO: 144
  framework sequence

SEQ ID NO: 286 - protein, 30 aa, Artificial
  framework sequence
EVQLVESGGGLVQVGGSLRLSCAASERTFN

SEQ ID NO: 287 - protein, 30 aa, Artificial; identical to SEQ ID NO: 204
  framework sequence

SEQ ID NO: 288 - protein, 30 aa, Artificial
  framework sequence
EVQLVESGGGLVQAGDSVRLSCAASGRTFS

SEQ ID NO: 289 - protein, 30 aa, Artificial
  framework sequence
EVQLVESGGGLVQAGGSLRLSCAASGIIFT

SEQ ID NO: 290 - protein, 30 aa, Artificial
  framework sequence
EVQLVESGGDLVQPGGSLRLSCEASGRIFG

SEQ ID NO: 291 - protein, 30 aa, Artificial
  framework sequence
EVQLVESGGGLVQAGGSLRLSCVASGRTFR

SEQ ID NO: 292 - protein, 30 aa, Artificial
  framework sequence
EVQLVESGGGLVQPGGSLRLSCAASGITLD

SEQ ID NO: 293 - protein, 30 aa, Artificial; identical to SEQ ID NO: 168
  framework sequence

SEQ ID NO: 294 - protein, 30 aa, Artificial; identical to SEQ ID NO: 242
  framework sequence

SEQ ID NO: 295 - protein, 30 aa, Artificial
  framework sequence
EVQLVESGGGLVQAGDSLRLSCTASGGTFI

SEQ ID NO: 296 - protein, 30 aa, Artificial
  framework sequence
EVQLVESGGGLVQAGGSLSLSCAASGLTFS

SEQ ID NO: 297 - protein, 30 aa, Artificial; identical to SEQ ID NO: 277
  framework sequence

SEQ ID NO: 298 - protein, 30 aa, Artificial
  framework sequence
KVQLVESGGGLVQVGGSLRLSCAASERTFD

SEQ ID NO: 299 - protein, 30 aa, Artificial; identical to SEQ ID NO: 144
  framework sequence

SEQ ID NO: 300 - protein, 30 aa, Artificial; identical to SEQ ID NO: 277
  framework sequence

SEQ ID NO: 301 - protein, 30 aa, Artificial
  framework sequence
EVQLVESGGGLVQAGGSLSLSCEASGRIFN

SEQ ID NO: 302 - protein, 30 aa, Artificial; identical to SEQ ID NO: 277
  framework sequence

SEQ ID NO: 303 - protein, 30 aa, Artificial; identical to SEQ ID NO: 277
  framework sequence

SEQ ID NO: 304 - protein, 30 aa, Artificial; identical to SEQ ID NO: 144
  framework sequence

SEQ ID NO: 305 - protein, 30 aa, Artificial
  framework sequence
EVQLVESGGGLVPAGDSLRLACAASERSFS

SEQ ID NO: 306 - protein, 30 aa, Artificial; identical to SEQ ID NO: 277
  framework sequence

SEQ ID NO: 307 - protein, 30 aa, Artificial; identical to SEQ ID NO: 168
  framework sequence

SEQ ID NO: 308 - protein, 30 aa, Artificial
  framework sequence
EVQLVESGGGLVQPGGSLTLSCAASGFSLE

SEQ ID NO: 309 - protein, 30 aa, Artificial; identical to SEQ ID NO: 277
  framework sequence

SEQ ID NO: 310 - protein, 30 aa, Artificial; identical to SEQ ID NO: 168
  framework sequence

SEQ ID NO: 311 - protein, 30 aa, Artificial; identical to SEQ ID NO: 168
  framework sequence

SEQ ID NO: 312 - protein, 30 aa, Artificial
  framework sequence
  misc_feature (19)..(19): Unknown amino acid, most likely one of the Camelid amino acid residues mentioned for this specific position in Tables A-5 to A-8.
EVQLVESGGGLVQAGGSLXLSCAVSGFTLD

SEQ ID NO: 313 - protein, 30 aa, Artificial
  framework sequence
EVQLVESGGGLVQAGGSLRLSCAVSGIAFR

SEQ ID NO: 314 - protein, 30 aa, Artificial
  framework sequence
EVQLVESGGGLVQAGGSLRLSCAASGITFD

SEQ ID NO: 315 - protein, 30 aa, Artificial
  framework sequence
EVQLVESGGGLVQAGGSLRLSCAASGIAFR

SEQ ID NO: 316 - protein, 30 aa, Artificial; identical to SEQ ID NO: 315
  framework sequence

SEQ ID NO: 317 - protein, 30 aa, Artificial
  framework sequence
EVQLVESGGGLVQPGGSLRLSCVASGRPLT

SEQ ID NO: 318 - protein, 30 aa, Artificial
  framework sequence
EVQLVESGGGSVQTGGSLTLSCTASGRTGS

SEQ ID NO: 319 - protein, 30 aa, Artificial; identical to SEQ ID NO: 144
  framework sequence

SEQ ID NO: 320 - protein, 30 aa, Artificial
  framework sequence
EVQLVESGGGLVQPGESLTLSCAASGFTFS

SEQ ID NO: 321 - protein, 30 aa, Artificial
  framework sequence
EVQLVESGGGLVQAGGSLRLSCAASGTFLS

SEQ ID NO: 322 - protein, 30 aa, Artificial
  framework sequence
EVQLVESGGGSVQPGGSLRLSCAASGLIVG

SEQ ID NO: 323 - protein, 30 aa, Artificial; identical to SEQ ID NO: 204
  framework sequence

SEQ ID NO: 324 - protein, 30 aa, Artificial
  framework sequence
EVQLVESGGGLVQPGGSLRLSCAVSGISVR

SEQ ID NO: 325 - protein, 30 aa, Artificial; identical to SEQ ID NO: 324
  framework sequence

SEQ ID NO: 326 - protein, 30 aa, Artificial
  framework sequence
EVQLVESGGGLAQEGGSLRLSCAASGRPLT

SEQ ID NO: 327 - protein, 30 aa, Artificial
  framework sequence
EVQLVESGGGLVTAGGSLRLSCAASGFRFS

SEQ ID NO: 328 - protein, 30 aa, Artificial; identical to SEQ ID NO: 274
  framework sequence

SEQ ID NO: 329 - protein, 30 aa, Artificial; identical to SEQ ID NO: 142
  framework sequence

SEQ ID NO: 330 - protein, 30 aa, Artificial
  framework sequence
EVQLVESGGGLVQPGGSLRLSCKASRSIFS

SEQ ID NO: 331 - protein, 30 aa, Artificial
  framework sequence
  misc_feature (3)..(3): Unknown amino acid, most likely one of the Camelid amino acid residues mentioned for this specific position in Tables A-5 to A-8.
EVXLVESGGGLVETGGSLRLSCAARGRIKS

SEQ ID NO: 332 - protein, 30 aa, Artificial; identical to SEQ ID NO: 142
  framework sequence

SEQ ID NO: 333 - protein, 30 aa, Artificial
  framework sequence
EVQLMESGGGVVQVGGSLRLSCAASGGTLY

SEQ ID NO: 334 - protein, 30 aa, Artificial
  framework sequence
EVQLVESGGGLAQTGGSLTLSCAASGRTPS

SEQ ID NO: 335 - protein, 30 aa, Artificial
  framework sequence
EVQLVESGGGLVQTGGSLRLSCAASGRTSR

SEQ ID NO: 336 - protein, 30 aa, Artificial
  framework sequence
EVQLVESGGGLVQTGGSLRLSCAASGRTPS

SEQ ID NO: 337 - protein, 30 aa, Artificial; identical to SEQ ID NO: 336
  framework sequence

SEQ ID NO: 338 - protein, 30 aa, Artificial
  framework sequence
  misc_feature (19)..(19): Unknown amino acid, most likely one of the Camelid amino acid residues mentioned for this specific position in Tables A-5 to A-8.
EVQLVESGGGLVQTGGSLXLSCAASGRTPR

SEQ ID NO: 339 - protein, 30 aa, Artificial; identical to SEQ ID NO: 336
  framework sequence

SEQ ID NO: 340 - protein, 30 aa, Artificial
  framework sequence
EVQLVESGGGLVQTGGSLRLSCTHSGRPLS

SEQ ID NO: 341 - protein, 30 aa, Artificial
  framework sequence
EVQLVESGGGSVQAGGSLRLSCAASGRTFS

SEQ ID NO: 342 - protein, 30 aa, Artificial
  framework sequence
EVQLVESGGGLVQAGGSLRLSCAASGFAFD

SEQ ID NO: 343 - protein, 30 aa, Artificial; identical to SEQ ID NO: 139
  framework sequence

SEQ ID NO: 344 - protein, 30 aa, Artificial; identical to SEQ ID NO: 341
  framework sequence

SEQ ID NO: 345 - protein, 30 aa, Artificial
  framework sequence
EVQLVESGGGLVQPGGSLRLSCAVSGFTSD

SEQ ID NO: 346 - protein, 30 aa, Artificial; identical to SEQ ID NO: 345
  framework sequence

SEQ ID NO: 347 - protein, 30 aa, Artificial; identical to SEQ ID NO: 345
  framework sequence

SEQ ID NO: 348 - protein, 30 aa, Artificial
  framework sequence
EVQLVESGGGLVQPGGSLILSCAVSGFTSD

SEQ ID NO: 349 - protein, 30 aa, Artificial
  framework sequence
EVQLVESGGGLVQPGGSLRLSCAASGFSFS

SEQ ID NO: 350 - protein, 30 aa, Artificial; identical to SEQ ID NO: 345
  framework sequence

SEQ ID NO: 351 - protein, 30 aa, Artificial; identical to SEQ ID NO: 345
  framework sequence

SEQ ID NO: 352 - protein, 30 aa, Artificial
  framework sequence
EVQLVESGGGLVQPGGSLRLSCAASGRTIA

SEQ ID NO: 353 - protein, 30 aa, Artificial
  framework sequence
EVQLVESRGGLVQPGGSLRLSCAVSGFTSD

SEQ ID NO: 354 - protein, 30 aa, Artificial
  framework sequence
EVQLVESGGRLVQAGDSLRLSCAASGRTFT

SEQ ID NO: 355 - protein, 30 aa, Artificial
  framework sequence
EVQLVESGGGLVQAGGSLTLSCAASGRTFS

SEQ ID NO: 356 - protein, 30 aa, Artificial; identical to SEQ ID NO: 354
  framework sequence

SEQ ID NO: 357 - protein, 30 aa, Artificial
  framework sequence
EVQLVESGGGLVQPGGSLRLSCAVSGFTSE

SEQ ID NO: 358 - protein, 30 aa, Artificial
  framework sequence
  misc_feature (3)..(3): Unknown amino acid, most likely one of the Camelid amino acid residues mentioned for this specific position in Tables A-5 to A-8.
EVXLVESGGALVQDGGSLRLSCAASGLTLS

SEQ ID NO: 359 - protein, 30 aa, Artificial
  framework sequence
  misc_feature (3)..(3): Unknown amino acid, most likely one of the Camelid amino acid residues mentioned for this specific position in Tables A-5 to A-8.
EVXLVESGGRLVQAGDSLRLSCAASGRTFI

SEQ ID NO: 360 - protein, 30 aa, Artificial
  framework sequence
EVQLVESGGGLVQSGGSLRLSCAASEGTFT

SEQ ID NO: 361 - protein, 30 aa, Artificial
  framework sequence
EVQLVESGGGSAQAGGSLRLSCAASGGTFS

SEQ ID NO: 362 - protein, 30 aa, Artificial
  framework sequence
EVQLVESGGGLVQAGGSLKLSCAASGRSFS

SEQ ID NO: 363 - protein, 30 aa, Artificial
  framework sequence
EVPLVESGGGLVQSGGSLRLSCAASGSFDS

SEQ ID NO: 364 - protein, 30 aa, Artificial
  framework sequence
EVQLVESGGGLVQAGGSLRLSCAASERTVS

SEQ ID NO: 365 - protein, 30 aa, Artificial
  framework sequence
EVQLVESGGGLVQAGGSLRLSCAASGTIFR

SEQ ID NO: 366 - protein, 30 aa, Artificial
  framework sequence
EVQLVESGGGLVQAGGSLRLSCAASGSIFR

SEQ ID NO: 367 - protein, 30 aa, Artificial
  framework sequence
EVQLVESGGALVQPGESLRLSCVVSGDTST

SEQ ID NO: 368 - protein, 30 aa, Artificial
  framework sequence
EVQLVESGGGSVQVGASLRLSCAARGRALS

SEQ ID NO: 369 - protein, 30 aa, Artificial
  framework sequence
EVQLVESGGGLVQAGGSLRVSCLASGNIVS

SEQ ID NO: 370 - protein, 30 aa, Artificial; identical to SEQ ID NO: 360
  framework sequence

SEQ ID NO: 371 - protein, 30 aa, Artificial
  framework sequence
EVQLVESGGGLVQPGGSLTLSCVASGRTFS

SEQ ID NO: 372 - protein, 30 aa, Artificial; identical to SEQ ID NO: 371
  framework sequence

SEQ ID NO: 373 - protein, 30 aa, Artificial; identical to SEQ ID NO: 144
  framework sequence

SEQ ID NO: 374 - protein, 30 aa, Artificial; identical to SEQ ID NO: 362
  framework sequence

SEQ ID NO: 375 - protein, 30 aa, Artificial
  framework sequence
EVQLVESGGGLMQAGDSLRLSCAASGRTSY

SEQ ID NO: 376 - protein, 30 aa, Artificial
  framework sequence
EVQLVESGGGLVQAGGSLRLSCAAAERTFS

SEQ ID NO: 377 - protein, 30 aa, Artificial; identical to SEQ ID NO: 360
  framework sequence

SEQ ID NO: 378 - protein, 5 aa, Artificial
  CDR sequence
FNYMG

SEQ ID NO: 379 - protein, 5 aa, Artificial
  CDR sequence
FNYMG

SEQ ID NO: 380 - protein, 5 aa, Artificial
  CDR sequence
FNYMG

SEQ ID NO: 381 - protein, 5 aa, Artificial
  CDR sequence
FNYMG

SEQ ID NO: 382 - protein, 5 aa, Artificial
  CDR sequence
FNYMG

SEQ ID NO: 383 - protein, 5 aa, Artificial
  CDR sequence
FNYMG

SEQ ID NO: 384 - protein, 5 aa, Artificial
  CDR sequence
FNYMG

SEQ ID NO: 385 - protein, 5 aa, Artificial
  CDR sequence
FNYMG

SEQ ID NO: 386 - protein, 14 aa, Artificial
  CDR sequence
LPASGNIFNLLTIA

SEQ ID NO: 387 - protein, 14 aa, Artificial
  CDR sequence
LPASGNIFNLLTIA

SEQ ID NO: 388 - protein, 5 aa, Artificial
  CDR sequence
IASMG

SEQ ID NO: 389 - protein, 5 aa, Artificial
  CDR sequence
TSAMG

SEQ ID NO: 390 - protein, 5 aa, Artificial
  CDR sequence
NYAMG

SEQ ID NO: 391 - protein, 5 aa, Artificial
  CDR sequence
SYSMG

SEQ ID NO: 392 - protein, 5 aa, Artificial
  CDR sequence
SYAMG

SEQ ID NO: 393 - protein, 5 aa, Artificial
  CDR sequence
SNVMG

SEQ ID NO: 394 - protein, 5 aa, Artificial
  CDR sequence
NYWMY

SEQ ID NO: 395 - protein, 5 aa, Artificial
  CDR sequence
FNVIG

SEQ ID NO: 396 - protein, 5 aa, Artificial
  CDR sequence
TYAAG

SEQ ID NO: 397 - protein, 5 aa, Artificial
  CDR sequence
TYAAG

SEQ ID NO: 398 - protein, 5 aa, Artificial
  CDR sequence
TYAMG

SEQ ID NO: 399 - protein, 5 aa, Artificial
  CDR sequence
INTMA

SEQ ID NO: 400 - protein, 5 aa, Artificial
  CDR sequence
INTMA

SEQ ID NO: 401 - protein, 5 aa, Artificial
  CDR sequence
INAMG

SEQ ID NO: 402 - protein, 5 aa, Artificial
  CDR sequence
INTMG

SEQ ID NO: 403 - protein, 5 aa, Artificial
  CDR sequence
INVMG

SEQ ID NO: 404 - protein, 5 aa, Artificial
  CDR sequence
INAMG

SEQ ID NO: 405 - protein, 5 aa, Artificial
  CDR sequence
INAMG

SEQ ID NO: 406 - protein, 5 aa, Artificial
  CDR sequence
INTMG

SEQ ID NO: 407 - protein, 5 aa, Artificial
  CDR sequence
INAMG

SEQ ID NO: 408 - protein, 5 aa, Artificial
  CDR sequence
INAMG

SEQ ID NO: 409 - protein, 5 aa, Artificial
  CDR sequence
INTMG

SEQ ID NO: 410 - protein, 5 aa, Artificial
  CDR sequence
INAMG

SEQ ID NO: 411 - protein, 5 aa, Artificial
  CDR sequence
INAMG

SEQ ID NO: 412 - protein, 5 aa, Artificial
  CDR sequence
INAMG

SEQ ID NO: 413 - protein, 5 aa, Artificial
  CDR sequence
GYGMG

SEQ ID NO: 414 - protein, 5 aa, Artificial
  CDR sequence
GYGMG

SEQ ID NO: 415 - protein, 8 aa, Artificial
  CDR sequence
TFRDYVMG

SEQ ID NO: 416 - protein, 5 aa, Artificial
  CDR sequence
DYAMG

SEQ ID NO: 417 - protein, 5 aa, Artificial
  CDR sequence
TKSMG

SEQ ID NO: 418 - protein, 5 aa, Artificial
  CDR sequence
TKSMG

SEQ ID NO: 419 - protein, 5 aa, Artificial
  CDR sequence
DFAIA

SEQ ID NO: 420 - protein, 5 aa, Artificial
  CDR sequence
DYAIA

SEQ ID NO: 421 - protein, 5 aa, Artificial
  CDR sequence
DYAIA

SEQ ID NO: 422 - protein, 5 aa, Artificial
  CDR sequence
DYAIA

SEQ ID NO: 423 - protein, 5 aa, Artificial
  CDR sequence
DYAIA

SEQ ID NO: 424 - protein, 5 aa, Artificial
  CDR sequence
SYAMG

SEQ ID NO: 425 - protein, 5 aa, Artificial
  CDR sequence
SYSMG

SEQ ID NO: 426 - protein, 5 aa, Artificial
  CDR sequence
NYWMY

SEQ ID NO: 427 - protein, 5 aa, Artificial
  CDR sequence
SYRMY

SEQ ID NO: 428 - protein, 5 aa, Artificial
  CDR sequence
GNPMG

SEQ ID NO: 429 - protein, 5 aa, Artificial
  CDR sequence
SNPMG

SEQ ID NO: 430 - protein, 5 aa, Artificial
  CDR sequence
SNPMG

SEQ ID NO: 431 - protein, 5 aa, Artificial
  CDR sequence
SSWMY

SEQ ID NO: 432 - protein, 5 aa, Artificial
  CDR sequence
EYAMG

SEQ ID NO: 433 - protein, 5 aa, Artificial
  CDR sequence
SSWMY

SEQ ID NO: 434 - protein, 5 aa, Artificial
  CDR sequence
TYGMG

SEQ ID NO: 435 - protein, 5 aa, Artificial
  CDR sequence
TYGMG

SEQ ID NO: 436 - protein, 5 aa, Artificial
  CDR sequence
NNWMY

SEQ ID NO: 437 - protein, 5 aa, Artificial
  CDR sequence
SSWMY

SEQ ID NO: 438 - protein, 5 aa, Artificial
  CDR sequence
NYWMY

SEQ ID NO: 439 - protein, 5 aa, Artificial
  CDR sequence
SYYMY

SEQ ID NO: 440 - protein, 5 aa, Artificial
  CDR sequence
TYTMG

SEQ ID NO: 441 - protein, 5 aa, Artificial
  CDR sequence
NYEMG

SEQ ID NO: 442 - protein, 5 aa, Artificial
  CDR sequence
DYAIG

SEQ ID NO: 443 - protein, 5 aa, Artificial
  CDR sequence
SHTMA

SEQ ID NO: 444 - protein, 5 aa, Artificial
  CDR sequence
NYEMG

SEQ ID NO: 445 - protein, 5 aa, Artificial
  CDR sequence
DYGMG

SEQ ID NO: 446 - protein, 5 aa, Artificial
  CDR sequence
SYAMG

SEQ ID NO: 447 - protein, 5 aa, Artificial
  CDR sequence
GSWMY

SEQ ID NO: 448 - protein, 5 aa, Artificial
  CDR sequence
TYAMG

SEQ ID NO: 449 - protein, 5 aa, Artificial
  CDR sequence
STFMG

SEQ ID NO: 450 - protein, 5 aa, Artificial
  CDR sequence
LADMD

SEQ ID NO: 451 - protein, 5 aa, Artificial
  CDR sequence
TYSMG

SEQ ID NO: 452 - protein, 6 aa, Artificial
  CDR sequence
SDDAMG

SEQ ID NO: 453 - protein, 5 aa, Artificial
  CDR sequence
NYEMG

SEQ ID NO: 454 - protein, 5 aa, Artificial
  CDR sequence
SVAMG

SEQ ID NO: 455 - protein, 5 aa, Artificial
  CDR sequence
THWMY

SEQ ID NO: 456 - protein, 5 aa, Artificial
  CDR sequence
TTAMA

SEQ ID NO: 457 - protein, 5 aa, Artificial
  CDR sequence
DYEMG

SEQ ID NO: 458 - protein, 5 aa, Artificial
  CDR sequence
DYEMG

SEQ ID NO: 459 - protein, 5 aa, Artificial
  CDR sequence
DYSMA

SEQ ID NO: 460 - protein, 5 aa, Artificial
  CDR sequence
TYRMG

SEQ ID NO: 461 - protein, 5 aa, Artificial
  CDR sequence
TYATG

SEQ ID NO: 462 - protein, 5 aa, Artificial
  CDR sequence
DYTMS

SEQ ID NO: 463 - protein, 5 aa, Artificial
  CDR sequence
IKSMG

SEQ ID NO: 464 - protein, 5 aa, Artificial
  CDR sequence
TYAMG

SEQ ID NO: 465 - protein, 4 aa, Artificial
  CDR sequence
  misc_feature (3)..(4): This CDR only comprises 2 amino acid residues (MA). The two residues marked Xaa are not present in the actual sequence and were only added because PatentIn 3.4 requires that an entered sequence contains at least 4 amino acid residues.
MAXX

SEQ ID NO: 466 - protein, 5 aa, Artificial
  CDR sequence
TYAMG

SEQ ID NO: 467 - protein, 6 aa, Artificial
  CDR sequence
SDYAMG

SEQ ID NO: 468 - protein, 5 aa, Artificial
  CDR sequence
TYAMG

SEQ ID NO: 469 - protein, 5 aa, Artificial
  CDR sequence
DYEMG

SEQ ID NO: 470 - protein, 5 aa, Artificial
  CDR sequence
NYRMY

SEQ ID NO: 471 - protein, 5 aa, Artificial
  CDR sequence
DNVMG

SEQ ID NO: 472 - protein, 5 aa, Artificial
  CDR sequence
GYWMY

SEQ ID NO: 473 - protein, 5 aa, Artificial
  CDR sequence
DYEMG

SEQ ID NO: 474 - protein, 5 aa, Artificial
  CDR sequence
RDTMG

SEQ ID NO: 475 - protein, 5 aa, Artificial
  CDR sequence
NFDMG

SEQ ID NO: 476 - protein, 5 aa, Artificial
  CDR sequence
SSWMY

SEQ ID NO: 477 - protein, 5 aa, Artificial
  CDR sequence
DYEMG

SEQ ID NO: 478 - protein, 5 aa, Artificial
  CDR sequence
NYEMG

SEQ ID NO: 479 - protein, 5 aa, Artificial
  CDR sequence
DNWMY

SEQ ID NO: 480 - protein, 5 aa, Artificial
  CDR sequence
SYAMG

SEQ ID NO: 481 - protein, 5 aa, Artificial
  CDR sequence
TYATG

SEQ ID NO: 482 - protein, 5 aa, Artificial
  CDR sequence
NYEMG

SEQ ID NO: 483 - protein, 5 aa, Artificial
  CDR sequence
NYEMG

SEQ ID NO: 484 - protein, 5 aa, Artificial
  CDR sequence
NFEMG

SEQ ID NO: 485 - protein, 5 aa, Artificial
  CDR sequence
NYEMG

SEQ ID NO: 486 - protein, 5 aa, Artificial
  CDR sequence
NRWMY

SEQ ID NO: 487 - protein, 5 aa, Artificial
  CDR sequence
NYEMG

SEQ ID NO: 488 - protein, 5 aa, Artificial
  CDR sequence
SSVMF

SEQ ID NO: 489 - protein, 5 aa, Artificial
  CDR sequence
NEEMG

SEQ ID NO: 490 - protein, 5 aa, Artificial
  CDR sequence
DYGMG

SEQ ID NO: 491 - protein, 5 aa, Artificial
  CDR sequence
NNWMY

SEQ ID NO: 492 - protein, 5 aa, Artificial
  CDR sequence
DYSMA

SEQ ID NO: 493 - protein, 5 aa, Artificial
  CDR sequence
DSWMY

SEQ ID NO: 494 - protein, 5 aa, Artificial
  CDR sequence
TYAMG

SEQ ID NO: 495 - protein, 6 aa, Artificial
  CDR sequence
TANDMA

SEQ ID NO: 496 - protein, 5 aa, Artificial
  CDR sequence
YYHIG

SEQ ID NO: 497 - protein, 5 aa, Artificial
  CDR sequence
RYTLA

SEQ ID NO: 498 - protein, 5 aa, Artificial
  CDR sequence
NYAMG

SEQ ID NO: 499 - protein, 5 aa, Artificial
  CDR sequence
GYTMG

SEQ ID NO: 500 - protein, 5 aa, Artificial
  CDR sequence
GYTMA

SEQ ID NO: 501 - protein, 5 aa, Artificial
  CDR sequence
GYTMG

SEQ ID NO: 502 - protein, 5 aa, Artificial
  CDR sequence
NSAMG

SEQ ID NO: 503 - protein, 5 aa, Artificial
  CDR sequence
GNTMG

SEQ ID NO: 504 - protein, 5 aa, Artificial
  CDR sequence
GNTMG

SEQ ID NO: 505 - protein, 5 aa, Artificial
  CDR sequence
GYTMG

SEQ ID NO: 506 - protein, 5 aa, Artificial
  CDR sequence
GYTMG

SEQ ID NO: 507 - protein, 5 aa, Artificial
  CDR sequence
GYTMG

SEQ ID NO: 508 - protein, 5 aa, Artificial
  CDR sequence
GYTMA

SEQ ID NO: 509 - protein, 5 aa, Artificial
  CDR sequence
GYTMG

SEQ ID NO: 510 - protein, 5 aa, Artificial
  CDR sequence
SYNMA

SEQ ID NO: 511 - protein, 5 aa, Artificial
  CDR sequence
NYEMG

SEQ ID NO: 512 - protein, 5 aa, Artificial
  CDR sequence
KTWMY

SEQ ID NO: 513 - protein, 5 aa, Artificial
  CDR sequence
DYTIA

SEQ ID NO: 514 - protein, 5 aa, Artificial
  CDR sequence
DYTIA

SEQ ID NO: 515 - protein, 5 aa, Artificial
  CDR sequence
DYTIA

SEQ ID NO: 516 - protein, 5 aa, Artificial
  CDR sequence
NYEMG

SEQ ID NO: 517 - protein, 5 aa, Artificial
  CDR sequence
DYTIA

SEQ ID NO: 518 - protein, 5 aa, Artificial
  CDR sequence
NYEMA

SEQ ID NO: 519 - protein, 5 aa, Artificial
  CDR sequence
NYVIG

SEQ ID NO: 520 - protein, 5 aa, Artificial
  CDR sequence
TYGMG

SEQ ID NO: 521 - protein, 5 aa, Artificial
  CDR sequence
IKSMG

SEQ ID NO: 522 - protein, 5 aa, Artificial
  CDR sequence
DYTIA

SEQ ID NO: 523 - protein, 5 aa, Artificial
  CDR sequence
RSAMG

SEQ ID NO: 524 - protein, 5 aa, Artificial
  CDR sequence
SYMMS

SEQ ID NO: 525 - protein, 5 aa, Artificial
  CDR sequence
SYVMG

SEQ ID NO: 526 - protein, 5 aa, Artificial
  CDR sequence
DYAIG

SEQ ID NO: 527 - protein, 5 aa, Artificial
  CDR sequence
SYTMG

SEQ ID NO: 528 - protein, 5 aa, Artificial
  CDR sequence
TYTMG

SEQ ID NO: 529 - protein, 5 aa, Artificial
  CDR sequence
DYAIG

SEQ ID NO: 530 - protein, 5 aa, Artificial
  CDR sequence
TYTMG

SEQ ID NO: 531 - protein, 5 aa, Artificial
  CDR sequence
RYAIG

SEQ ID NO: 532 - protein, 5 aa, Artificial
  CDR sequence
SYTFG

SEQ ID NO: 533 - protein, 5 aa, Artificial
  CDR sequence
NYGRA

SEQ ID NO: 534 - protein, 5 aa, Artificial
  CDR sequence
SYTMG

SEQ ID NO: 535 - protein, 5 aa, Artificial
  CDR sequence
TYVTG

SEQ ID NO: 536 - protein, 5 aa, Artificial
  CDR sequence
NYGMG

SEQ ID NO: 537 - protein, 5 aa, Artificial
  CDR sequence
TYTMA

SEQ ID NO: 538 - protein, 5 aa, Artificial
  CDR sequence
SYTMG

SEQ ID NO: 539 - protein, 5 aa, Artificial
  CDR sequence
TYTMG

SEQ ID NO: 540 - protein, 7 aa, Artificial
  CDR sequence
VDTNTMG

SEQ ID NO: 541 - protein, 5 aa, Artificial
  CDR sequence
NYAMA

SEQ ID NO: 542 - protein, 5 aa, Artificial
  CDR sequence
FNGMG

SEQ ID NO: 543 - protein, 5 aa, Artificial
  CDR sequence
SQSMG

SEQ ID NO: 544 - protein, 5 aa, Artificial
  CDR sequence
DYATG

SEQ ID NO: 545 - protein, 5 aa, Artificial
  CDR sequence
DYPIG

SEQ ID NO: 546 - protein, 5 aa, Artificial
  CDR sequence
TYVMA

SEQ ID NO: 547 - protein, 6 aa, Artificial
  CDR sequence
TTYVMG

SEQ ID NO: 548 - protein, 5 aa, Artificial
  CDR sequence
TYGMG

SEQ ID NO: 549 - protein, 5 aa, Artificial
  CDR sequence
DYAIG

SEQ ID NO: 550 - protein, 5 aa, Artificial
  CDR sequence
SYAMA

SEQ ID NO: 551 - protein, 5 aa, Artificial
  CDR sequence
NYPMG

SEQ ID NO: 552 - protein, 5 aa, Artificial
  CDR sequence
DYAKG

SEQ ID NO: 553 - protein, 5 aa, Artificial
  CDR sequence
LNGMG

SEQ ID NO: 554 - protein, 5 aa, Artificial
  CDR sequence
DYAIG

SEQ ID NO: 555 - protein, 5 aa, Artificial
  CDR sequence
DYAIG

SEQ ID NO: 556 - protein, 5 aa, Artificial
  CDR sequence
DYAMG

SEQ ID NO: 557 - protein, 5 aa, Artificial
  CDR sequence
SYNTG

SEQ ID NO: 558 - protein, 5 aa, Artificial
  CDR sequence
DYAIG

SEQ ID NO: 559 - protein, 5 aa, Artificial
  CDR sequence
DYAIG

SEQ ID NO: 560 - protein, 5 aa, Artificial
  CDR sequence
HYAVG

SEQ ID NO: 561 - protein, 5 aa, Artificial
  CDR sequence
DYAIG

SEQ ID NO: 562 - protein, 5 aa, Artificial
  CDR sequence
YYAFG

SEQ ID NO: 563 - protein, 5 aa, Artificial
  CDR sequence
EHTIG

SEQ ID NO: 564 - protein, 5 aa, Artificial
  CDR sequence
DYAIG

SEQ ID NO: 565 - protein, 5 aa, Artificial
  CDR sequence
YNSVA

SEQ ID NO: 566 - protein, 6 aa, Artificial
  CDR sequence
DDYAIG

SEQ ID NO: 567 - protein, 5 aa, Artificial
  CDR sequence
YNSVA

SEQ ID NO: 568 - protein, 5 aa, Artificial
  CDR sequence
YNSVA

SEQ ID NO: 569 - protein, 5 aa, Artificial
  CDR sequence
GSTMA

SEQ ID NO: 570 - protein, 5 aa, Artificial
  CDR sequence
TDGVG

SEQ ID NO: 571 - protein, 5 aa, Artificial
  CDR sequence
SYAMG

SEQ ID NO: 572 - protein, 5 aa, Artificial
  CDR sequence
SYWMY

SEQ ID NO: 573 - protein, 5 aa, Artificial
  CDR sequence
INRMG

SEQ ID NO: 574 - protein, 5 aa, Artificial
  CDR sequence
RPAMG

SEQ ID NO: 575 - protein, 5 aa, Artificial
  CDR sequence
SPAMA

SEQ ID NO: 576 - protein, 5 aa, Artificial
  CDR sequence
SSVVN

SEQ ID NO: 577 - protein, 5 aa, Artificial
  CDR sequence
SSVVN

SEQ ID NO: 578 - protein, 5 aa, Artificial
  CDR sequence
TYGMA

SEQ ID NO: 579 - protein, 5 aa, Artificial
  CDR sequence
VYDMG

SEQ ID NO: 580 - protein, 5 aa, Artificial
  CDR sequence
DYAIG

SEQ ID NO: 581 - protein, 5 aa, Artificial
  CDR sequence
RAWMY

SEQ ID NO: 582 - protein, 5 aa, Artificial
  CDR sequence
INTMD

SEQ ID NO: 583 - protein, 5 aa, Artificial
  CDR sequence
IADMG

SEQ ID NO: 584 - protein, 5 aa, Artificial
  CDR sequence
RAWMY

SEQ ID NO: 585 - protein, 5 aa, Artificial
  CDR sequence
SYIVG

SEQ ID NO: 586 - protein, 5 aa, Artificial
  CDR sequence
IVAMG

SEQ ID NO: 587 - protein, 5 aa, Artificial
  CDR sequence
LVAMG

SEQ ID NO: 588 - protein, 5 aa, Artificial
  CDR sequence
IVAMG

SEQ ID NO: 589 - protein, 5 aa, Artificial
  CDR sequence
IVAMG

SEQ ID NO: 590 - protein, 5 aa, Artificial
  CDR sequence
LVAMG

SEQ ID NO: 591 - protein, 5 aa, Artificial
  CDR sequence
IIAMG

SEQ ID NO: 592 - protein, 5 aa, Artificial
  CDR sequence
MFAVG

SEQ ID NO: 593 - protein, 5 aa, Artificial
  CDR sequence
DYAMG

SEQ ID NO: 594 - protein, 5 aa, Artificial
  CDR sequence
DYEIG

SEQ ID NO: 595 - protein, 5 aa, Artificial
  CDR sequence
TYVMG

SEQ ID NO: 596 - protein, 5 aa, Artificial
  CDR sequence
SYVMG

SEQ ID NO: 597 - protein, 5 aa, Artificial
  CDR sequence
YYVIA

SEQ ID NO: 598 - protein, 5 aa, Artificial
  CDR sequence
YYVVA

SEQ ID NO: 599 - protein, 5 aa, Artificial
  CDR sequence
YYVIA

SEQ ID NO: 600 - protein, 5 aa, Artificial
  CDR sequence
YYVIA

SEQ ID NO: 601 - protein, 5 aa, Artificial
  CDR sequence
RNWMY

SEQ ID NO: 602 - protein, 5 aa, Artificial
  CDR sequence
YYVIA

SEQ ID NO: 603 - protein, 5 aa, Artificial
  CDR sequence
FYVIA

SEQ ID NO: 604 - protein, 5 aa, Artificial
  CDR sequence
AYKMA

SEQ ID NO: 605 - protein, 5 aa, Artificial
  CDR sequence
YYVIA

SEQ ID NO: 606 - protein, 5 aa, Artificial
  CDR sequence
SYRMG

SEQ ID NO: 607 - protein, 5 aa, Artificial
  CDR sequence
SYHMG

SEQ ID NO: 608 - protein, 5 aa, Artificial
  CDR sequence
NYRVG

SEQ ID NO: 609 - protein, 5 aa, Artificial
  CDR sequence
YYVIA

SEQ ID NO: 610 - protein, 5 aa, Artificial
  CDR sequence
NYVAA

SEQ ID NO: 611 - protein, 5 aa, Artificial
  CDR sequence
SYRMG

SEQ ID NO: 612 - protein, 5 aa, Artificial
  CDR sequence
IYPLG

SEQ ID NO: 613 - protein, 5 aa, Artificial
  CDR sequence
SYTMA

SEQ ID NO: 614 - protein, 5 aa, Artificial
  CDR sequence
RYAMG

SEQ ID NO: 615 - protein, 5 aa, Artificial
  CDR sequence
DTVMA

SEQ ID NO: 616 - protein, 5 aa, Artificial
  CDR sequence
TYTSG

SEQ ID NO: 617 - protein, 5 aa, Artificial
  CDR sequence
IENMY

SEQ ID NO: 618 - protein, 5 aa, Artificial
  CDR sequence
INNMY

SEQ ID NO: 619 - protein, 5 aa, Artificial
  CDR sequence
YHAIG

SEQ ID NO: 620 - protein, 5 aa, Artificial
  CDR sequence
NYGVG

SEQ ID NO: 621 - protein, 5 aa, Artificial
  CDR sequence
RNVMA

SEQ ID NO: 622 - protein, 5 aa, Artificial
  CDR sequence
IYPLG

SEQ ID NO: 623 - protein, 5 aa, Artificial
  CDR sequence
TDVMG

SEQ ID NO: 624 - protein, 5 aa, Artificial
  CDR sequence
TDVMG

SEQ ID NO: 625 - protein, 5 aa, Artificial
  CDR sequence
SYAMG

SEQ ID NO: 626 - protein, 5 aa, Artificial
  CDR sequence
RYAMG

SEQ ID NO: 627 - protein, 5 aa, Artificial
  CDR sequence
IYTMA

SEQ ID NO: 628 - protein, 5 aa, Artificial
  CDR sequence
DYAVG

SEQ ID NO: 629 - protein, 5 aa, Artificial
  CDR sequence
IYPLG

SEQ ID NO: 630 - protein, 14 aa, Artificial
  framework sequence
WFRQAPGKEREFVA

SEQ ID NO: 631 - protein, 14 aa, Artificial
  framework sequence
WFRQAPGKEREFVA

SEQ ID NO: 632 - protein, 14 aa, Artificial
  framework sequence
WFRQAPGKEREFVS

SEQ ID NO: 633 - protein, 14 aa, Artificial
  framework sequence
WFRQAPGKEREFVA

SEQ ID NO: 634 - protein, 14 aa, Artificial
  framework sequence
WFRQAPGKEREFVA

SEQ ID NO: 635 - protein, 14 aa, Artificial
  framework sequence
WFRQAPGKEREFVA

SEQ ID NO: 636 - protein, 14 aa, Artificial
  framework sequence
WFRQAPGKEREFVA

SEQ ID NO: 637 - protein, 14 aa, Artificial
  framework sequence
WFRQAPGKEREFVA

SEQ ID NO: 638 - protein, 14 aa, Artificial
  framework sequence
WHRQAPGMQRELVA

SEQ ID NO: 639 - protein, 14 aa, Artificial
  framework sequence
WHRQTPGKQRELVA

SEQ ID NO: 640 - protein, 14 aa, Artificial
  framework sequence
WYRQAPGKQRELAA

SEQ ID NO: 641 - protein, 14 aa, Artificial
  framework sequence
WFRQAPGKEREFVA

SEQ ID NO: 642 - protein, 14 aa, Artificial
  framework sequence
WFRQVPGKEREFVA

SEQ ID NO: 643 - protein, 14 aa, Artificial
  framework sequence
WFRQAPGKEREFVA

SEQ ID NO: 644 - protein, 14 aa, Artificial
  framework sequence
WFRQAPGKEREFVA

SEQ ID NO: 645 - protein, 14 aa, Artificial
  framework sequence
WFRQYPGKLREFVA

SEQ ID NO: 646 - protein, 14 aa, Artificial
  framework sequence
WVRQAPGKGLERVA

SEQ ID NO: 647 - protein, 14 aa, Artificial
  framework sequence
WHRQAPGKERELVA

SEQ ID NO: 648 - protein, 14 aa, Artificial
  framework sequence
WFRQDPGEEREFVS

SEQ ID NO: 649 - protein, 14 aa, Artificial
  framework sequence
WFRQAPGKDREFVS

SEQ ID NO: 650 - protein, 14 aa, Artificial
  framework sequence
WFRQAPGKEREFVS

SEQ ID NO: 651 - protein, 14 aa, Artificial
  framework sequence
WFRQAPGKEREFVA

SEQ ID NO: 652 - protein, 14 aa, Artificial
  framework sequence
WFRQAPGKEREFVA

SEQ ID NO: 653 - protein, 14 aa, Artificial
  framework sequence
WFRQAPGKEREFVA

SEQ ID NO: 654 - protein, 14 aa, Artificial
  framework sequence
WFRQAPGKEREFVA

SEQ ID NO: 655 - protein, 14 aa, Artificial
  framework sequence
WFRQAPGKEREFVA

SEQ ID NO: 656 - protein, 14 aa, Artificial
  framework sequence
WFRQAPGKEREFVA

SEQ ID NO: 657 - protein, 14 aa, Artificial
  framework sequence
WFRQAPGKEREFVA

SEQ ID NO: 658 - protein, 14 aa, Artificial
  framework sequence
WFRQAPGKEREFVA

SEQ ID NO: 659 - protein, 14 aa, Artificial
  framework sequence
WFRQAPGKEREFVA

SEQ ID NO: 660 - protein, 14 aa, Artificial
  framework sequence
WFRQAPGKEREFVA

SEQ ID NO: 661 - protein, 14 aa, Artificial
  framework sequence
WFRQAPGKEREFVA

SEQ ID NO: 662 - protein, 14 aa, Artificial
  framework sequence
WFRQAPGKEREFVA

SEQ ID NO: 663 - protein, 14 aa, Artificial
  framework sequence
WFRQAPGKEREFVA

SEQ ID NO: 664 - protein, 14 aa, Artificial
  framework sequence
WFRQAPGKEREFVA

SEQ ID NO: 665 - protein, 14 aa, Artificial
  framework sequence
WFRQGPGKEREFLA

SEQ ID NO: 666 - protein, 14 aa, Artificial
  framework sequence
WFRQGPGKEREFLA

SEQ ID NO: 667 - protein, 14 aa, Artificial
  framework sequence
WFRQAPGKEREFVA

SEQ ID NO: 668 - protein, 14 aa, Artificial
  framework sequence
WFRQVPGKEREFVA

SEQ ID NO: 669 - protein, 14 aa, Artificial
  framework sequence
WFRQAPGKEREFVA

SEQ ID NO: 670 - protein, 14 aa, Artificial
  framework sequence
WFRQAPGKEREFVA

SEQ ID NO: 671 - protein, 14 aa, Artificial
  framework sequence
WFRQAPGKEREGVS

SEQ ID NO: 672 - protein, 14 aa, Artificial
  framework sequence
WFRQAPGKEREGVS

SEQ ID NO: 673 - protein, 14 aa, Artificial
  framework sequence
WFRQAPGKEREGVS

SEQ ID NO: 674 - protein, 14 aa, Artificial
  framework sequence
WFRQAPGKEREGVS

SEQ ID NO: 675 - protein, 14 aa, Artificial
  framework sequence
WFRQAPGKEREGVS

SEQ ID NO: 676 - protein, 14 aa, Artificial
  framework sequence
WFRQAPGKEREFVA

SEQ ID NO: 677 - protein, 14 aa, Artificial
  framework sequence
WFRQAPGKEREFVA

SEQ ID NO: 678 - protein, 14 aa, Artificial
  framework sequence
WIRQAPGKGLEWVS

SEQ ID NO: 679 - protein, 14 aa, Artificial
  framework sequence
WVRQAPGKGLEWVS

SEQ ID NO: 680 - protein, 14 aa, Artificial
  framework sequence
WFRQASGKKREFVA

SEQ ID NO: 681 - protein, 14 aa, Artificial
  framework sequence
WFRQAPEKKREFVA

SEQ ID NO: 682 - protein, 14 aa, Artificial
  framework sequence
WFRQAPGKKREFVA

SEQ ID NO: 683 - protein, 14 aa, Artificial
  framework sequence
WVRRAPGKGLEWVS

SEQ ID NO: 684 - protein, 14 aa, Artificial
  framework sequence
WFRQNPGNEREFVA

SEQ ID NO: 685 - protein, 14 aa, Artificial
  framework sequence
WVRQAPGKGLEWVA

SEQ ID NO: 686 - protein, 14 aa, Artificial
  framework sequence
WFRQAPGKEREFVA

SEQ ID NO: 687 - protein, 14 aa, Artificial
  framework sequence
WFRQAPGKEREFVA

SEQ ID NO: 688 - protein, 14 aa, Artificial
  framework sequence
WFRQAPGKGHEWVS

SEQ ID NO: 689 - protein, 14 aa, Artificial
  framework sequence
WVRQAPGKGLEWVA

SEQ ID NO: 690 - protein, 14 aa, Artificial
  framework sequence
WIRQAPGKGLEWVS

SEQ ID NO: 691 - protein, 14 aa, Artificial
  framework sequence
WVRQAPGKGLEWVS

SEQ ID NO: 692 - protein, 14 aa, Artificial
  framework sequence
WFRQAPGKEREIVA

SEQ ID NO: 693 - protein, 14 aa, Artificial
  framework sequence
WFRQAPGTEREFVG

SEQ ID NO: 694 - protein, 14 aa, Artificial
  framework sequence
WFRQAPGKEREGVS

SEQ ID NO: 695 - protein, 14 aa, Artificial
  framework sequence
WFRQAPGKEREFVG

SEQ ID NO: 696 - protein, 14 aa, Artificial
  framework sequence
WFRQAPGTEREFVG

SEQ ID NO: 697 - protein, 14 aa, Artificial
  framework sequence
WFRQAPGKEREFVA

SEQ ID NO: 698 - protein, 14 aa, Artificial
  framework sequence
WFRQAPGKEREFVA

SEQ ID NO: 699 - protein, 14 aa, Artificial
  framework sequence
WVRQAPGKGLEWVS

SEQ ID NO: 700 - protein, 14 aa, Artificial
  framework sequence
WFRQAPGKEREFVA

SEQ ID NO: 701 - protein, 14 aa, Artificial
  framework sequence
WFRQTPGKEREFVA

SEQ ID NO: 702 - protein, 14 aa, Artificial
  framework sequence
WYRQALGKQRELVA

SEQ ID NO: 703 - protein, 14 aa, Artificial
  framework sequence
WFRQVPGKEREPVA

SEQ ID NO: 704 - protein, 14 aa, Artificial
  framework sequence
WFRQAPGKEREFVS

SEQ ID NO: 705 - protein, 14 aa, Artificial
  framework sequence
WFRQAPGTEREFVG

SEQ ID NO: 706 - protein, 14 aa, Artificial
  framework sequence
WFRQAPGKEREFVA

SEQ ID NO: 707 - protein, 14 aa, Artificial
  framework sequence
WVRQAPGKGLEWVA

SEQ ID NO: 708 - protein, 14 aa, Artificial
  framework sequence
WFRQAPGKEREFVA

SEQ ID NO: 709 - protein, 14 aa, Artificial
  framework sequence
WFRQAPGTEREFVA

SEQ ID NO: 710 - protein, 14 aa, Artificial
  framework sequence
WFRQAPGTEREFVA

SEQ ID NO: 711 - protein, 14 aa, Artificial
  framework sequence
WFRQAPGKEREFVA

SEQ ID NO: 712 - protein, 14 aa, Artificial
  framework sequence
WFRQSPGREREFVT

SEQ ID NO: 713 - protein, 14 aa, Artificial
  framework sequence
WFRQAPGKEREFVA

SEQ ID NO: 714 - protein, 14 aa, Artificial
  framework sequence
WVRQAPGKGLEWVS

SEQ ID NO: 715 - protein, 14 aa, Artificial
  framework sequence
WYRQAPGKQRELVA

SEQ ID NO: 716 - protein, 14 aa, Artificial
  framework sequence
WFRQVPGKEREPVA

SEQ ID NO: 717 - protein, 14 aa, Artificial
  framework sequence
WFRQAPGEEREFVA

SEQ ID NO: 718 - protein, 14 aa, Artificial
  framework sequence
WFRQAPGKEREFVA

SEQ ID NO: 719 - protein, 14 aa, Artificial
  framework sequence
WFRQAPGKEREFVS

SEQ ID NO: 720 - protein, 14 aa, Artificial
  framework sequence
WFRQAPGKEREFVA

SEQ ID NO: 721 - protein, 14 aa, Artificial
  framework sequence
WFRQAPGTEREFVA

SEQ ID NO: 722 - protein, 14 aa, Artificial
  framework sequence
WVRQAPGKGLEWVS

SEQ ID NO: 723 - protein, 14 aa, Artificial
  framework sequence
WFRQAPGKEREFVA

SEQ ID NO: 724 - protein, 14 aa, Artificial
  framework sequence
WLRQAPGKGLEWVS

SEQ ID NO: 725 - protein, 14 aa, Artificial
  framework sequence
WFRQAPGTEREFAA

SEQ ID NO: 726 - protein, 14 aa, Artificial
  framework sequence
WFRQAPGKEREFVA

SEQ ID NO: 727 - protein, 14 aa, Artificial
  framework sequence
WFRQAPGREREFVA

SEQ ID NO: 728 - protein, 14 aa, Artificial
  framework sequence
WVRQAPGKGLEWVA

SEQ ID NO: 729 - protein, 14 aa, Artificial
  framework sequence
WFRQAPGTEREFVA

SEQ ID NO: 730 - protein, 14 aa, Artificial
  framework sequence
WFRQAPGTERAFVG

SEQ ID NO: 731 - protein, 14 aa, Artificial
  framework sequence
WFRQAPGKGHEWVS

SEQ ID NO: 732 - protein, 14 aa, Artificial
  framework sequence
WFRRAPGKEREFLT

SEQ ID NO: 733 - protein, 14 aa, Artificial
  framework sequence
WFRQAPGKEREFVS

SEQ ID NO: 734 - protein, 14 aa, Artificial
  framework sequence
WFRQAPGTEREFVA

SEQ ID NO: 735 - protein, 14 aa, Artificial
  framework sequence
WFRQAPGTEREFVS

SEQ ID NO: 736 - protein, 14 aa, Artificial
  framework sequence
WFRQAPGTEREFVA

SEQ ID NO: 737 - protein, 14 aa, Artificial
  framework sequence
WFRQAPGTEREFVG

SEQ ID NO: 738 - protein, 14 aa, Artificial
  framework sequence
WVRQAPGKGLEWVS

SEQ ID NO: 739 - protein, 14 aa, Artificial
  framework sequence
WFRQAPGTEREFVG

SEQ ID NO: 740 - protein, 14 aa, Artificial
  framework sequence
WLRQAPGKGLEWVS

SEQ ID NO: 741 - protein, 14 aa, Artificial
  framework sequence
WFRQAPGTEREFVA

SEQ ID NO: 742 - protein, 14 aa, Artificial
  framework sequence
WFRQPPGTEREFVA

SEQ ID NO: 743 - protein, 14 aa, Artificial
  framework sequence
WFRQAPGKGHEWVS

SEQ ID NO: 744 - protein, 14 aa, Artificial
  framework sequence
WFRQAPGKEREFVA

SEQ ID NO: 745 - protein, 14 aa, Artificial
  framework sequence
WVRQAPGKELEWVS

SEQ ID NO: 746 - protein, 14 aa, Artificial
  framework sequence
WFRQAPGKEREFVA

SEQ ID NO: 747 - protein, 14 aa, Artificial
  framework sequence
WYRQAPGKQREWVA

SEQ ID NO: 748 - protein, 14 aa, Artificial
  framework sequence
WFRQAPGKEREGVS

SEQ ID NO: 749 - protein, 14 aa, Artificial
  framework sequence
WFRQEPGKEREFVA

SEQ ID NO: 750 - protein, 14 aa, Artificial
  framework sequence
WFRRAPGRERELVG

SEQ ID NO: 751 - protein, 14 aa, Artificial
  framework sequence
WYRQAPGKERELVT

SEQ ID NO: 752 - protein, 14 aa, Artificial
  framework sequence
WYRQAPGKERELVT

SEQ ID NO: 753 - protein, 14 aa, Artificial
  framework sequence
WYRQAPGKERELVT

SEQ ID NO: 754 - protein, 14 aa, Artificial
  framework sequence
WYRQLPGKQRELIA

SEQ ID NO: 755 - protein, 14 aa, Artificial
  framework sequence
WYRQTPGKQRELVA

SEQ ID NO: 756 - protein, 14 aa, Artificial
  framework sequence
WYRQTPGKQRELVA

SEQ ID NO: 757 - protein, 14 aa, Artificial
  framework sequence
WYRQAPGKERELVT

SEQ ID NO: 758 - protein, 14 aa, Artificial
  framework sequence
WYRQAPGKERELVT

SEQ ID NO: 759 - protein, 14 aa, Artificial
  framework sequence
WYRQAPGKERELVT

SEQ ID NO: 760 - protein, 14 aa, Artificial
  framework sequence
WYRQAPGKERELVT

SEQ ID NO: 761 - protein, 14 aa, Artificial
  framework sequence
WYRQAPGKERELVT

SEQ ID NO: 762 - protein, 14 aa, Artificial
  framework sequence
WFRQAPGKEREFVT

SEQ ID NO: 763 - protein, 14 aa, Artificial
  framework sequence
  misc_feature (13)..(13): Unknown amino acid, most likely one of the Camelid amino acid residues mentioned for this specific position in Tables A-5 to A-8.
WFRQAPGTEREFXG

SEQ ID NO: 764 - protein, 14 aa, Artificial
  framework sequence
WFRQAPGKGLEQVS

SEQ ID NO: 765 - protein, 14 aa, Artificial
  framework sequence
WFRQAPGKEREGVS

SEQ ID NO: 766 - protein, 14 aa, Artificial
  framework sequence
WFRQAPGKEREGVS

SEQ ID NO: 767 - protein, 14 aa, Artificial
  framework sequence
WFRQAPGKEREGVS

SEQ ID NO: 768 - protein, 14 aa, Artificial
  framework sequence
WFRQAPGTEREFVG

SEQ ID NO: 769 - protein, 14 aa, Artificial
  framework sequence
WFRQAPGKEREGVS

SEQ ID NO: 770 - protein, 14 aa, Artificial
  framework sequence
WFRQAPGTEREFVA

SEQ ID NO: 771 - protein, 14 aa, Artificial
  framework sequence
WFRQGPGKEREGVS

SEQ ID NO: 772 - protein, 14 aa, Artificial
  framework sequence
WFRQAPGKNREFVA

SEQ ID NO: 773 - protein, 14 aa, Artificial
  framework sequence
WYRQAPGKQRELVA

SEQ ID NO: 774 - protein, 14 aa, Artificial
  framework sequence
WFRQAPGKEREGVS

SEQ ID NO: 775 - protein, 14 aa, Artificial
  framework sequence
WFRQAPGKERENVA

SEQ ID NO: 776 - protein, 14 aa, Artificial
  framework sequence
WVRQAPGKGLEWVS

SEQ ID NO: 777 - protein, 14 aa, Artificial
  framework sequence
WFRQAPGKEREFVA

SEQ ID NO: 778 - protein, 14 aa, Artificial
  framework sequence
WFRQAPGKEREGVS

SEQ ID NO: 779 - protein, 14 aa, Artificial
  framework sequence
WFRQAPGKEREFVA

SEQ ID NO: 780 - protein, 14 aa, Artificial
  framework sequence
WFRQAPGKEREFVA

SEQ ID NO: 781 - protein, 14 aa, Artificial
  framework sequence
WFRQAPGKEREGVS

SEQ ID NO: 782 - protein, 14 aa, Artificial
  framework sequence
WFRQAPGKEREFVS

SEQ ID NO: 783 - protein, 14 aa, Artificial
  framework sequence
WFRQAPGKQREGVA

SEQ ID NO: 784 - protein, 14 aa, Artificial
  framework sequence
WFRRAPDKDREFVA

SEQ ID NO: 785 - protein, 14 aa, Artificial
  framework sequence
WFRQAPGKERDFVA

SEQ ID NO: 786 - protein, 14 aa, Artificial
  framework sequence
WFRQAPGKEREFVA

SEQ ID NO: 787 - protein, 14 aa, Artificial
  framework sequence
WFRQAPGKEREFVA

SEQ ID NO: 788 - protein, 14 aa, Artificial
  framework sequence
WFRQAPGKEREFVA

SEQ ID NO: 789 - protein, 14 aa, Artificial
  framework sequence
WFRQTPGKERDLVA

SEQ ID NO: 790 - protein, 14 aa, Artificial
  framework sequence
WFRQAPGKEREFVA

SEQ ID NO: 791 - protein, 14 aa, Artificial
  framework sequence
WFRQAPGKEREFVA

SEQ ID NO: 792 - protein, 14 aa, Artificial
  framework sequence
WYRQAPGKEHEFVA

SEQ ID NO: 793 - protein, 14 aa, Artificial
  framework sequence
WFRQAPGKEREFVA

SEQ ID NO: 794 - protein, 14 aa, Artificial
  framework sequence
WYRQVQGKQRELVA

SEQ ID NO: 795 - protein, 14 aa, Artificial
  framework sequence
WFRQAPGKEREIVA

SEQ ID NO: 796 - protein, 14 aa, Artificial
  framework sequence
WFRQAPGKEREGVS

SEQ ID NO: 797 - protein, 14 aa, Artificial
  framework sequence
WFRQAPGKEREGVS

SEQ ID NO: 798 - protein, 14 aa, Artificial
  framework sequence
WFRQAPGKEREFVT

SEQ ID NO: 799 - protein, 14 aa, Artificial
  framework sequence
WFRQAPGKEREFVA

SEQ ID NO: 800 - protein, 14 aa, Artificial
  framework sequence
WFRQAPGKEREFVA

SEQ ID NO: 801 - protein, 14 aa, Artificial
  framework sequence
WFRQAPGKEREGVS

SEQ ID NO: 802 - protein, 14 aa, Artificial
  framework sequence
WFRQAPGKEREFAA

SEQ ID NO: 803 - protein, 14 aa, Artificial
  framework sequence
WFRQAPGNEREFVA

SEQ ID NO: 804 - protein, 14 aa, Artificial
  framework sequence
WFRQAPGKEREGVS

SEQ ID NO: 805 - protein, 14 aa, Artificial
  framework sequence
WYRQAQGKQRELVA

SEQ ID NO: 806 - protein, 14 aa, Artificial
  framework sequence
WFRQAPGKEREGVS

SEQ ID NO: 807 - protein, 14 aa, Artificial
  framework sequence
WFRQALGKEREGVS

SEQ ID NO: 808 - protein, 14 aa, Artificial
  framework sequence
WFRQAPGKERECVG

SEQ ID NO: 809 - protein, 14 aa, Artificial
  framework sequence
WFRQAPGKEREFVA

SEQ ID NO: 810 - protein, 14 aa, Artificial
  framework sequence
WFRQAPGKEREGIS

SEQ ID NO: 811 - protein, 14 aa, Artificial
  framework sequence
WFRQAPGKEREGVS

SEQ ID NO: 812 - protein, 14 aa, Artificial
  framework sequence
WFRQAPGKEREGVS

SEQ ID NO: 813 - protein, 14 aa, Artificial
  framework sequence
WFRQAPGKEREGVS

SEQ ID NO: 814 - protein, 14 aa, Artificial
  framework sequence
WFRQAPGKEREGVS

SEQ ID NO: 815 - protein, 14 aa, Artificial
  framework sequence
WFRQAPGKEREGVS

SEQ ID NO: 816 - protein, 14 aa, Artificial
  framework sequence
WFRQAPGKEREGVS

SEQ ID NO: 817 - protein, 14 aa, Artificial
  framework sequence
WSRQAPGSQRELVA

SEQ ID NO: 818 - protein, 14 aa, Artificial
  framework sequence
WFRQAPGKEREGVS

SEQ ID NO: 819 - protein, 14 aa, Artificial
  framework sequence
WSRQAPGSQREVVA

SEQ ID NO: 820 - protein, 14 aa, Artificial
  framework sequence
WSRQAPGSQRELVA

SEQ ID NO: 821 - protein, 14 aa, Artificial
  framework sequence
WFRQAPGKECEFVA

SEQ ID NO: 822 - protein, 14 aa, Artificial
  framework sequence
WFRQAPGKEREFVS

SEQ ID NO: 823 - protein, 14 aa, Artificial
  framework sequence
WFRQAPGKEREFVA

SEQ ID NO: 824 - protein, 14 aa, Artificial
  framework sequence
WVRQAPGRELEWVA

SEQ ID NO: 825 - protein, 14 aa, Artificial
  framework sequence
WYRQAPGKERELVA

SEQ ID NO: 826 - protein, 14 aa, Artificial
  framework sequence
WYRQAPGKQRELVA

SEQ ID NO: 827 - protein, 14 aa, Artificial
  framework sequence
WFRQVPGKEREFVA

SEQ ID NO: 828 - protein, 14 aa, Artificial
  framework sequence
WYRQAPGKQRELVA

SEQ ID NO: 829 - protein, 14 aa, Artificial
  framework sequence
WYRQAPGKQRELVA

SEQ ID NO: 830 - protein, 14 aa, Artificial
  framework sequence
WFRQAPGKEREFVA

SEQ ID NO: 831 - protein, 14 aa, Artificial
  framework sequence
WFRQAPGKEREFVA

SEQ ID NO: 832 - protein, 14 aa, Artificial
  framework sequence
WFRQAPGKEREGVS

SEQ ID NO: 833 - protein, 14 aa, Artificial
  framework sequence
WVRQAPGETLEWVS

SEQ ID NO: 834 - protein, 14 aa, Artificial
  framework sequence
WHRQVPGKQRELVA

SEQ ID NO: 835 - protein, 14 aa, Artificial
  framework sequence
WYRQAPGKQRELVA

SEQ ID NO: 836 - protein, 14 aa, Artificial
  framework sequence
WVRQAPGETLEWVS

SEQ ID NO: 837 - protein, 14 aa, Artificial
  framework sequence
WFSQAPGQDREFVG

SEQ ID NO: 838 - protein, 14 aa, Artificial
  framework sequence
WFRQIPGKDREPVG

SEQ ID NO: 839 - protein, 14 aa, Artificial
  framework sequence
WFRQTPGKEREFVG

SEQ ID NO: 840 - protein, 14 aa, Artificial
  framework sequence
WFRQTPGKEREFVG

SEQ ID NO: 841 - protein, 14 aa, Artificial
  framework sequence
WFRQTPGKERESVG

SEQ ID NO: 842 - protein, 14 aa, Artificial
  framework sequence
WFRQTPGKEREFVG

SEQ ID NO: 843 - protein, 14 aa, Artificial
  framework sequence
WFRQTPGKEREFVG

SEQ ID NO: 844 - protein, 14 aa, Artificial
  framework sequence
WFRQAPGEQRVLVA

SEQ ID NO: 845 - protein, 14 aa, Artificial
  framework sequence
WFRQAPGKEREFVA

SEQ ID NO: 846 - protein, 14 aa, Artificial
  framework sequence
WFRQAPGKEREGVA

SEQ ID NO: 847 - protein, 14 aa, Artificial
  framework sequence
WFRQAPGKEREFVA

SEQ ID NO: 848 - protein, 14 aa, Artificial
  framework sequence
WFRQAPGKEREFVA

SEQ ID NO: 849 - protein, 14 aa, Artificial
  framework sequence
WFRQTPGHEREGVS

SEQ ID NO: 850 - protein, 14 aa, Artificial
  framework sequence
WFRQTPGHEREGVS

SEQ ID NO: 851 - protein, 14 aa, Artificial
  framework sequence
WFRQTPGHEREGVS

SEQ ID NO: 852 - protein, 14 aa, Artificial
  framework sequence
WFRQTPGHEREGVS

SEQ ID NO: 853 - protein, 14 aa, Artificial
  framework sequence
WVRQAPGKGLEWVG

SEQ ID NO: 854 - protein, 14 aa, Artificial
  framework sequence
WFRQTPGHEREGLS

SEQ ID NO: 855 - protein, 14 aa, Artificial
  framework sequence
WFRQTPGHEREGVS

SEQ ID NO: 856 - protein, 14 aa, Artificial
  framework sequence
WFRQAPDKARERVA

SEQ ID NO: 857 - protein, 14 aa, Artificial
  framework sequence
WFRQTPGHEREGVS

SEQ ID NO: 858 - protein, 14 aa, Artificial
  framework sequence
WFRQAPGKEREFVS

SEQ ID NO: 859 - protein, 14 aa, Artificial
  framework sequence
WFRQAPGKEREYVA

SEQ ID NO: 860 - protein, 14 aa, Artificial
  framework sequence
WFRQAPGKEREFVS

SEQ ID NO: 861 - protein, 14 aa, Artificial
  framework sequence
WFRQTPGHEREGVS

SEQ ID NO: 862 - protein, 14 aa, Artificial
  framework sequence
WFRQAPGKEREYVG

SEQ ID NO: 863 - protein, 14 aa, Artificial
  framework sequence
WFRQAPGKEREFVA

SEQ ID NO: 864 - protein, 14 aa, Artificial
  framework sequence
WFRQAPGKDRKFVA

SEQ ID NO: 865 - protein, 14 aa, Artificial
  framework sequence
WFRQAPEKEHEFVA

SEQ ID NO: 866 - protein, 14 aa, Artificial
  framework sequence
WFRQAPGKEREFVA

SEQ ID NO: 867 - protein, 14 aa, Artificial
  framework sequence
WYRQAPGKQRDFVA

SEQ ID NO: 868 - protein, 14 aa, Artificial
  framework sequence
WFRQAPGKERDLVA

SEQ ID NO: 869 - protein, 14 aa, Artificial
  framework sequence
WFRQAPGNQREWVA

SEQ ID NO: 870 - protein, 14 aa, Artificial
  framework sequence
WFRQAHENQREWVA

SEQ ID NO: 871 - protein, 14 aa, Artificial
  framework sequence
WFRQAPGKGREGVS

SEQ ID NO: 872 - protein, 14 aa, Artificial
  framework sequence
WFRQAPGKEREFVA

SEQ ID NO: 873 - protein, 14 aa, Artificial
  framework sequence
WYRQAPGKQRELVA

SEQ ID NO: 874 - protein, 14 aa, Artificial
  framework sequence
WFRQAPGKDRKFVA

SEQ ID NO: 875 - protein, 14 aa, Artificial
  framework sequence
WFRQAPGKEREFVA

SEQ ID NO: 876 - protein, 14 aa, Artificial
  framework sequence
WFRQAPGKEREFVA

SEQ ID NO: 877 - protein, 14 aa, Artificial
  framework sequence
WFRQAPGKDREFVA

SEQ ID NO: 878 - protein, 14 aa, Artificial
  framework sequence
WFRQAPGKEREFVA

SEQ ID NO: 879 - protein, 14 aa, Artificial
  framework sequence
WFRQAPGKEREFVA

SEQ ID NO: 880 - protein, 14 aa, Artificial
  framework sequence
WFRQAPGKEREFVS

SEQ ID NO: 881 - protein, 14 aa, Artificial
  framework sequence
WFRQAPGKDRKFVA

SEQ ID NO: 882 - protein, 17 aa, Artificial
  CDR sequence
AIRWSGSSTYYADSVKG

SEQ ID NO: 883 - protein, 17 aa, Artificial
  CDR sequence
AIRWSGSSTYYADSVKG

SEQ ID NO: 884 - protein, 17 aa, Artificial
  CDR sequence
AIRWSGISTYYADSVKG

SEQ ID NO: 885 - protein, 17 aa, Artificial
  CDR sequence
AIRWSGRSTYYADSVKG

SEQ ID NO: 886 - protein, 17 aa, Artificial
  CDR sequence
AIRWSGSSTYYADSVKG

SEQ ID NO: 887 - protein, 17 aa, Artificial
  CDR sequence
AIRWSGSSTYYADSVKG

SEQ ID NO: 888 - protein, 17 aa, Artificial
  CDR sequence
TIRWSGSSTDYADSVKG

SEQ ID NO: 889 - protein, 17 aa, Artificial
  CDR sequence
TIRWSGSSTYYADSVKG

SEQ ID NO: 890 - protein, 16 aa, Artificial
  CDR sequence
TINSGSRTNYADSVKG

SEQ ID NO: 891 - protein, 16 aa, Artificial
  CDR sequence
TINSGGRTNYTDSVKG

SEQ ID NO: 892 - protein, 16 aa, Artificial
  CDR sequence
VIGSEGDTDYADSMKG

SEQ ID NO: 893 - protein, 17 aa, Artificial
  CDR sequence
AINWNAGSTYHADSVKG

SEQ ID NO: 894 - protein, 16 aa, Artificial
  CDR sequence
AISRSGLRTFYSDSVK

SEQ ID NO: 895 - protein, 17 aa, Artificial
  CDR sequence
YISGGGLTIYYAHSVKG

SEQ ID NO: 896 - protein, 17 aa, Artificial
  CDR sequence
AIIWSRGNTYYADSVKG

SEQ ID NO: 897 - protein, 17 aa, Artificial
  CDR sequence
AIWWSAGTTKYADSVKG

SEQ ID NO: 898 - protein, 17 aa, Artificial
  CDR sequence
PLNPGGTITLYADFVKS

SEQ ID NO: 899 - protein, 16 aa, Artificial
  CDR sequence
SITGHDSTYYTGSVKG

SEQ ID NO: 900 - protein, 17 aa, Artificial
  CDR sequence
TISRGGGTTGYADAVKG

SEQ ID NO: 901 - protein, 17 aa, Artificial
  CDR sequence
TISRGGGGTYSADAVTG

SEQ ID NO: 902 - protein, 17 aa, Artificial
  CDR sequence
TISRGGGSTDYADAVKG

SEQ ID NO: 903 - protein, 21 aa, Artificial
  CDR sequence
ALVKGFSWGSGSSIYADSVRG

SEQ ID NO: 904 - protein, 21 aa, Artificial
  CDR sequence
ALVKGFSWGSGSSIYADSVRG

SEQ ID NO: 905 - protein, 21 aa, Artificial
  CDR sequence
AIVKGFSWGSGSTIYADSVKG

SEQ ID NO: 906 - protein, 21 aa, Artificial
  CDR sequence
ALVKGFSWGSGSTIYADSVKG

SEQ ID NO: 907 - protein, 21 aa, Artificial
  CDR sequence
ALVKGFSWGSGSSIYADSVRG

SEQ ID NO: 908 - protein, 21 aa, Artificial
  CDR sequence
AIVKGFSWGSGSTIYADSVKG

SEQ ID NO: 909 - protein, 21 aa, Artificial
  CDR sequence
AIVKGFSWGSGSIMYADSVKG

SEQ ID NO: 910 - protein, 21 aa, Artificial
  CDR sequence
ALVKGFSWGSGSNIVADSVKG

SEQ ID NO: 911 - protein, 21 aa, Artificial
  CDR sequence
AIVKGFSWGSGSTIYADSVKG

SEQ ID NO: 912 - protein, 21 aa, Artificial
  CDR sequence
AIVKGFSWGSGSVIYADSVKG

SEQ ID NO: 913 - protein, 21 aa, Artificial
  CDR sequence
AIVKGFSWGSGSTIYADSVKG

SEQ ID NO: 914 - protein, 21 aa, Artificial
  CDR sequence
AIVKGFSWGSGSTIYADSVKG

SEQ ID NO: 915 - protein, 21 aa, Artificial
  CDR sequence
AIVKGFSWGSGSTIYADSVKG

SEQ ID NO: 916 - protein, 21 aa, Artificial
  CDR sequence
AIVKGFSWGSGSTIYADSVKG

SEQ ID NO: 917 - protein, 17 aa, Artificial
  CDR sequence
TTAWNGDFTYYADSVKD

SEQ ID NO: 918 - protein, 17 aa, Artificial
  CDR sequence
TTAWNGDFTYYADSVKD

SEQ ID NO: 919 - protein, 17 aa, Artificial
  CDR sequence
VISRGGGRTDYDDSVKG

SEQ ID NO: 920 - protein, 17 aa, Artificial
  CDR sequence
AISRGGGKTYYVDSEKG

SEQ ID NO: 921 - protein, 17 aa, Artificial
  CDR sequence
RISPGGTSRYYGDFVKG

SEQ ID NO: 922 - protein, 17 aa, Artificial
  CDR sequence
RISPGGTSRYYGDFVKG

SEQ ID NO: 923 - protein, 17 aa, Artificial
  CDR sequence
GIDSGDGSTYYADSVKG

SEQ ID NO: 924 - protein, 17 aa, Artificial
  CDR sequence
GIDSGDGSAYYADSVKG

SEQ ID NO: 925 - protein, 17 aa, Artificial
  CDR sequence
GIDCSDGSTYYANSVKG

SEQ ID NO: 926 - protein, 17 aa, Artificial
  CDR sequence
GVDSGDGSTYYADSVKG

SEQ ID NO: 927 - protein, 17 aa, Artificial
  CDR sequence
GIDSGDGSTYYADSVKG

SEQ ID NO: 928 - protein, 17 aa, Artificial
  CDR sequence
RISQGGTAIYYADSVKG

SEQ ID NO: 929 - protein, 17 aa, Artificial
  CDR sequence
RISPSGSAIYYADSVKG

SEQ ID NO: 930 - protein, 16 aa, Artificial
  CDR sequence
TIKTSGSAAYADFVKG

SEQ ID NO: 931 - protein, 17 aa, Artificial
  CDR sequence
SIGAVGSLPAYADFVKG

SEQ ID NO: 932 - protein, 17 aa, Artificial
  CDR sequence
SIDWSGGITSYADSVKG

SEQ ID NO: 933 - protein, 17 aa, Artificial
  CDR sequence
IISGNGGITNYANSVKG

SEQ ID NO: 934 - protein, 17 aa, Artificial
  CDR sequence
IISGNGGITNYANSVKG

SEQ ID NO: 935 - protein, 17 aa, Artificial
  CDR sequence
TIKSGGGSTVYADFVKG

SEQ ID NO: 936 - protein, 17 aa, Artificial
  CDR sequence
AISRGGGFTDYADSVKG

SEQ ID NO: 937 - protein, 16 aa, Artificial
  CDR sequence
TIKASSSAVYADFVKG

SEQ ID NO: 938 - protein, 17 aa, Artificial
  CDR sequence
ANNWSGGATSYADSVKG

SEQ ID NO: 939 - protein, 17 aa, Artificial
  CDR sequence
ANNWSGGATSYADSVKS

SEQ ID NO: 940 - protein, 17 aa, Artificial
  CDR sequence
TIKTGAGSTAYADFVKG

SEQ ID NO: 941 - protein, 16 aa, Artificial
  CDR sequence
TIKTGGSAAYADFVKG

SEQ ID NO: 942 - protein, 16 aa, Artificial
  CDR sequence
TIKTSGSAAYADFVKG

SEQ ID NO: 943 - protein, 16 aa, Artificial
  CDR sequence
TITTTGGRAYADYVKG

SEQ ID NO: 944 - protein, 17 aa, Artificial
  CDR sequence
ASNWSGGSKYYSDSVKG

SEQ ID NO: 945 - protein, 17 aa, Artificial
  CDR sequence
TINRRGSSTYYADSVKG

SEQ ID NO: 946 - protein, 17 aa, Artificial
  CDR sequence
CISSSDGSTYYADSVKG

SEQ ID NO: 947 - protein, 17 aa, Artificial
  CDR sequence
TIVRIFGDTYYADSVKG

SEQ ID NO: 948 - protein, 17 aa, Artificial
  CDR sequence
TINRRGSSTYYEDSVKG

SEQ ID NO: 949 - protein, 17 aa, Artificial
  CDR sequence
VINWSGGSTGYAASVKG

SEQ ID NO: 950 - protein, 17 aa, Artificial
  CDR sequence
GSNWSGGSTPYADSVVG

SEQ ID NO: 951 - protein, 16 aa, Artificial
  CDR sequence
TIKPNGSTASADSVKG

SEQ ID NO: 952 - protein, 17 aa, Artificial
  CDR sequence
ASNWSGGSKHYADSVLG

SEQ ID NO: 953 - protein, 17 aa, Artificial
  CDR sequence
AINWSGTFTWYSDSVKG

SEQ ID NO: 954 - protein, 16 aa, Artificial
  CDR sequence
SISTGYRTNYADFVKG

SEQ ID NO: 955 - protein, 17 aa, Artificial
  CDR sequence
AVNWNGISTYYADSVKG

SEQ ID NO: 956 - protein, 17 aa, Artificial
  CDR sequence
AINWSGGSTSYTDSVRG

SEQ ID NO: 957 - protein, 17 aa, Artificial
  CDR sequence
SINRRGSSTYYADSVKG

SEQ ID NO: 958 - protein, 17 aa, Artificial
  CDR sequence
AITGDSRSTYYSDSLKG

SEQ ID NO: 959 - protein, 21 aa, Artificial
  CDR sequence
TSTFNILTGTENTYYSDSVKG

SEQ ID NO: 960 - protein, 17 aa, Artificial
  CDR sequence
ATNWSGGSTPYGDSVIG

SEQ ID NO: 961 - protein, 17 aa, Artificial
  CDR sequence
TINWRGSSTYYADSVKG

SEQ ID NO: 962 - protein, 17 aa, Artificial
  CDR sequence
SINRRGSSTFYADSVKG

SEQ ID NO: 963 - protein, 17 aa, Artificial
  CDR sequence
AHAWLASTTDYADSVKG

SEQ ID NO: 964 - protein, 17 aa, Artificial
  CDR sequence
SFNWSGGSTYYADSVKG

SEQ ID NO: 965 - protein, 17 aa, Artificial
  CDR sequence
ATRGSNGLAYYGNSAKG

SEQ ID NO: 966 - protein, 17 aa, Artificial
  CDR sequence
SISRDGGRTYYAGSMKG

SEQ ID NO: 967 - protein, 15 aa, Artificial
  CDR sequence
GIASGVTNYADSVKG

SEQ ID NO: 968 - protein, 17 aa, Artificial
  CDR sequence
AVNWNGISTYYADSVKG

SEQ ID NO: 969 - protein, 15 aa, Artificial
  CDR sequence
VISGGSTNYADSVKG

SEQ ID NO: 970 - protein, 17 aa, Artificial
  CDR sequence
ASNWSGGSKNYADSVLG

SEQ ID NO: 971 - protein, 17 aa, Artificial
  CDR sequence
AINWSGGSTTYADSVKG

SEQ ID NO: 972 - protein, 17 aa, Artificial
  CDR sequence
ASNWSGGSKYYADSVKG

SEQ ID NO: 973 - protein, 17 aa, Artificial
  CDR sequence
AISWRGSSTYYADSVKG

SEQ ID NO: 974 - protein, 17 aa, Artificial
  CDR sequence
SIGAIGNVPAYADFVKG

SEQ ID NO: 975 - protein, 17 aa, Artificial
  CDR sequence
AIAGRGSRLDYADSVKG

SEQ ID NO: 976 - protein, 16 aa, Artificial
  CDR sequence
TIKTTGGGAYAEFVKG

SEQ ID NO: 977 - protein, 17 aa, Artificial
  CDR sequence
AINWRGSSTYYADSVKG

SEQ ID NO: 978 - protein, 17 aa, Artificial
  CDR sequence
AINWSGGSRSYADSVLG

SEQ ID NO: 979 - protein, 17 aa, Artificial
  CDR sequence
AINRSGSSTYVSASVKG

SEQ ID NO: 980 - protein, 16 aa, Artificial
  CDR sequence
TVKTNNSTVYADFVKG

SEQ ID NO: 981 - protein, 17 aa, Artificial
  CDR sequence
AISWRGSSTYYADSVKG

SEQ ID NO: 982 - protein, 17 aa, Artificial
  CDR sequence
TISRRGSSTYYADSVKG

SEQ ID NO: 983 - protein, 17 aa, Artificial
  CDR sequence
TIKTGTGSTAYADSVKG

SEQ ID NO: 984 - protein, 17 aa, Artificial
  CDR sequence
GLTLSGGSTYYADSVKG

SEQ ID NO: 985 - protein, 17 aa, Artificial
  CDR sequence
AMRGSNGLAYYANSVKG

SEQ ID NO: 986 - protein, 17 aa, Artificial
  CDR sequence
AISRRRSSTYYADSVKG

SEQ ID NO: 987 - protein, 17 aa, Artificial
  CDR sequence
TISRRGSSTYYADSVKG

SEQ ID NO: 988 - protein, 17 aa, Artificial
  CDR sequence
TINWRGSSTYYADSVKG

SEQ ID NO: 989 - protein, 17 aa, Artificial
  CDR sequence
TINRRGSSTYYADSVKG

SEQ ID NO: 990 - protein, 16 aa, Artificial
  CDR sequence
TIKPNGSTAYADFVKG

SEQ ID NO: 991 - protein, 17 aa, Artificial
  CDR sequence
TISRRGSSTYYADSVKG

SEQ ID NO: 992 - protein, 16 aa, Artificial
  CDR sequence
TIKPSGSTIYPNPAKG

SEQ ID NO: 993 - protein, 17 aa, Artificial
  CDR sequence
TISRRGTGTYYADSVKG

SEQ ID NO: 994 - protein, 17 aa, Artificial
  CDR sequence
AINRRGSSTYYADSVKG

SEQ ID NO: 995 - protein, 17 aa, Artificial
  CDR sequence
TIKTGAGSTAYADFVKG

SEQ ID NO: 996 - protein, 17 aa, Artificial
  CDR sequence
AHAWLASRTDYADSVKG

SEQ ID NO: 997 - protein, 17 aa, Artificial
  CDR sequence
TISNSGFTTRYADSVKG

SEQ ID NO: 998 - protein, 17 aa, Artificial
  CDR sequence
ASNWSGGSTPYADSVMG

SEQ ID NO: 999 - protein, 16 aa, Artificial
  CDR sequence
TITRGDITLYAHSVKG

SEQ ID NO: 1000 - protein, 17 aa, Artificial
  CDR sequence
CIDSSDGSTYYADSVKG

SEQ ID NO: 1001 - protein, 17 aa, Artificial
  CDR sequence
AISLSGTTAFYSNSVEG

SEQ ID NO: 1002 - protein, 17 aa, Artificial
  CDR sequence
AITWSGGGTYYADSVKG

SEQ ID NO: 1003 - protein, 16 aa, Artificial
  CDR sequence
SISHRGGTNYADSVKG

SEQ ID NO: 1004 - protein, 16 aa, Artificial
  CDR sequence
SISHRGGTNYADSVKG

SEQ ID NO: 1005 - protein, 16 aa, Artificial
  CDR sequence
SISHRGGTNYADSVKG

SEQ ID NO: 1006 - protein, 16 aa, Artificial
  CDR sequence
HITSRGHTTYADFVKG

SEQ ID NO: 1007 - protein, 16 aa, Artificial
  CDR sequence
SITSRGYTSYADSVKG

SEQ ID NO: 1008 - protein, 16 aa, Artificial
  CDR sequence
SITSRGYTSYADSVKG

SEQ ID NO: 1009 - protein, 16 aa, Artificial
  CDR sequence
SISHRGGTNYADSVKG

SEQ ID NO: 1010 - protein, 16 aa, Artificial
  CDR sequence
SISHRGGTNYAESVKG

SEQ ID NO: 1011 - protein, 16 aa, Artificial
  CDR sequence
SISHRGGTNYADSVKG

SEQ ID NO: 1012 - protein, 16 aa, Artificial
  CDR sequence
SISHRGGTNYADSVKG

SEQ ID NO: 1013 - protein, 16 aa, Artificial
  CDR sequence
SISHRGGTNYADSVKG

SEQ ID NO: 1014 - protein, 17 aa, Artificial
  CDR sequence
AIIQSGGTTYYDDSVKG

SEQ ID NO: 1015 - protein, 17 aa, Artificial
  CDR sequence
TISRRGSSTYYADSVKG

SEQ ID NO: 1016 - protein, 19 aa, Artificial
  CDR sequence
SIHTGFGVGVTYYADAVKG

SEQ ID NO: 1017 - protein, 17 aa, Artificial
  CDR sequence
CISSSALITFYADSVKG

SEQ ID NO: 1018 - protein, 17 aa, Artificial
  CDR sequence
CISSSALITFYADSVKG

SEQ ID NO: 1019 - protein, 17 aa, Artificial
  CDR sequence
CISSSALITFYADSVKG

SEQ ID NO: 1020 - protein, 17 aa, Artificial
  CDR sequence
SINLRGSSTYYADSVKG

SEQ ID NO: 1021 - protein, 17 aa, Artificial
  CDR sequence
CISSSALITFYADSVKG

SEQ ID NO: 1022 - protein, 17 aa, Artificial
  CDR sequence
TINRRGSSTYYADSVKG

SEQ ID NO: 1023 - protein, 17 aa, Artificial
  CDR sequence
CIRCTGGSTTYADSVKG

SEQ ID NO: 1024 - protein, 16 aa, Artificial
  CDR sequence
AIKRGGSAYYSHPVRG

SEQ ID NO: 1025 - protein, 15 aa, Artificial
  CDR sequence
GITSGGTNYADSVKG

SEQ ID NO: 1026 - protein, 17 aa, Artificial
  CDR sequence
CISSVDGSTNYGYPMKG

SEQ ID NO: 1027 - protein, 17 aa, Artificial
  CDR sequence
AISGGGLITDYTDSVKG

SEQ ID NO: 1028 - protein, 17 aa, Artificial
  CDR sequence
FISSGGGISSYADSVEG

SEQ ID NO: 1029 - protein, 17 aa, Artificial
  CDR sequence
AISSGGSITDYGDSVKG

SEQ ID NO: 1030 - protein, 17 aa, Artificial
  CDR sequence
CISSSDGSTYYADSVKG

SEQ ID NO: 1031 - protein, 17 aa, Artificial
  CDR sequence
AISWIASVTEHSDSVKG

SEQ ID NO: 1032 - protein, 17 aa, Artificial
  CDR sequence
VRTGKTGGTRYADSVKG

SEQ ID NO: 1033 - protein, 17 aa, Artificial
  CDR sequence
CISSSDGSTDYADSVKG

SEQ ID NO: 1034 - protein, 14 aa, Artificial
  CDR sequence
TISGSGLIKDSVKD

SEQ ID NO: 1035 - protein, 20 aa, Artificial
  CDR sequence
CISNLNSTDSKTYYADFVKG

SEQ ID NO: 1036 - protein, 17 aa, Artificial
  CDR sequence
QISWIGGRTAYADSVKG

SEQ ID NO: 1037 - protein, 17 aa, Artificial
  CDR sequence
GVNWSGSSTHYLDSVKG

SEQ ID NO: 1038 - protein, 17 aa, Artificial
  CDR sequence
AISWIASVTEYSDSVKG

SEQ ID NO: 1039 - protein, 17 aa, Artificial
  CDR sequence
TISGSGLITSYEDSVKD

SEQ ID NO: 1040 - protein, 17 aa, Artificial
  CDR sequence
GVNWSGSSTYYLDSVKG

SEQ ID NO: 1041 - protein, 17 aa, Artificial
  CDR sequence
GITGSGLRTYYADSVKG

SEQ ID NO: 1042 - protein, 17 aa, Artificial
  CDR sequence
AISWIASVTDYSDSVKG

SEQ ID NO: 1043 - protein, 14 aa, Artificial
  CDR sequence
TISGSGLIKDSVKD

SEQ ID NO: 1044 - protein, 16 aa, Artificial
  CDR sequence
AISWSGTTVYADSVKG

SEQ ID NO: 1045 - protein, 17 aa, Artificial
  CDR sequence
AISWRNSSTNYADSVKG

SEQ ID NO: 1046 - protein, 16 aa, Artificial
  CDR sequence
RILSSISTYYVDSVKG

SEQ ID NO: 1047 - protein, 17 aa, Artificial
  CDR sequence
AISSDGISTFYTDSVKG

SEQ ID NO: 1048 - protein, 17 aa, Artificial
  CDR sequence
CISGNHGSTYYADSVKG

SEQ ID NO: 1049 - protein, 17 aa, Artificial
  CDR sequence
CISSSDGSTYYADSVKG

SEQ ID NO: 1050 - protein, 17 aa, Artificial
  CDR sequence
TISGSGLRTSYKDSVED

SEQ ID NO: 1051 - protein, 19 aa, Artificial
  CDR sequence
AIRRSGESGDTSYADSVKG

SEQ ID NO: 1052 - protein, 17 aa, Artificial
  CDR sequence
FISVSGIRTYYADSVKG

SEQ ID NO: 1053 - protein, 17 aa, Artificial
  CDR sequence
CISSSDGSTYYADSVKG

SEQ ID NO: 1054 - protein, 17 aa, Artificial
  CDR sequence
AISWIASVIEYSDSVKG

SEQ ID NO: 1055 - protein, 17 aa, Artificial
  CDR sequence
AISSSGLNTDYTDSVKG

SEQ ID NO: 1056 - protein, 17 aa, Artificial
  CDR sequence
CISSSDGSTYYADSVKG

SEQ ID NO: 1057 - protein, 16 aa, Artificial
  CDR sequence
RILSSISTYYTDSVKG

SEQ ID NO: 1058 - protein, 17 aa, Artificial
  CDR sequence
CISSSIGSTYYADSVKG

SEQ ID NO: 1059 - protein, 17 aa, Artificial
  CDR sequence
CISSSDGFTYYADSVKG

SEQ ID NO: 1060 - protein, 17 aa, Artificial
  CDR sequence
AISKSGGSTIYADSVKG

SEQ ID NO: 1061 - protein, 17 aa, Artificial
  CDR sequence
ATSGSTFSTYYTDSVKG

SEQ ID NO: 1062 - protein, 17 aa, Artificial
  CDR sequence
CISSTDSSTYYVDSVKG

SEQ ID NO: 1063 - protein, 17 aa, Artificial
  CDR sequence
FISSSGGSTYYADSVKG

SEQ ID NO: 1064 - protein, 16 aa, Artificial
  CDR sequence
CIDMDGSSHYADVVRG

SEQ ID NO: 1065 - protein, 16 aa, Artificial
  CDR sequence
  misc_feature (3)..(3): Xaa can be any naturally occurring amino acid
CIXSSDGSTYYADSVK

SEQ ID NO: 1066 - protein, 16 aa, Artificial
  CDR sequence
CISMVNDSTYYADSVK

SEQ ID NO: 1067 - protein, 16 aa, Artificial
  CDR sequence
CISSSDGSTYYADSVK

SEQ ID NO: 1068 - protein, 16 aa, Artificial
  CDR sequence
YISSSDGSTYYADSVK

SEQ ID NO: 1069 - protein, 16 aa, Artificial
  CDR sequence
RITNSARTNYADSVKG

SEQ ID NO: 1070 - protein, 17 aa, Artificial
  CDR sequence
LISSSDGSTYYADSVKG

SEQ ID NO: 1071 - protein, 16 aa, Artificial
  CDR sequence
GITNSARTNYADSVKG

SEQ ID NO: 1072 - protein, 16 aa, Artificial
  CDR sequence
SISNSARTKYADSVKG

SEQ ID NO: 1073 - protein, 16 aa, Artificial
  CDR sequence
RISGSGTINYADSLRG

SEQ ID NO: 1074 - protein, 17 aa, Artificial
  CDR sequence
AIKWIGGSKYYSNSAEG

SEQ ID NO: 1075 - protein, 17 aa, Artificial
  CDR sequence
HINWNGGNTYYADSVRG

SEQ ID NO: 1076 - protein, 17 aa, Artificial
  CDR sequence
RIQPGSSYTAYADSVKG

SEQ ID NO: 1077 - protein, 16 aa, Artificial
  CDR sequence
VIISGGSTNYADSVKG

SEQ ID NO: 1078 - protein, 16 aa, Artificial
  CDR sequence
IIGSGGNTNYPESVKG

SEQ ID NO: 1079 - protein, 17 aa, Artificial
  CDR sequence
TIRRSSAWTDYADSVKG

SEQ ID NO: 1080 - protein, 16 aa, Artificial
  CDR sequence
LIMGGAIRKYADDVKG

SEQ ID NO: 1081 - protein, 16 aa, Artificial
  CDR sequence
LIMGGAITKYADDVKG

SEQ ID NO: 1082 - protein, 17 aa, Artificial
  CDR sequence
RIGAEPGATVYGDSVKG

SEQ ID NO: 1083 - protein, 16 aa, Artificial
  CDR sequence
VIVGSRTTDYADSVKG

SEQ ID NO: 1084 - protein, 17 aa, Artificial
  CDR sequence
CISSSDGSTYYADSVKG

SEQ ID NO: 1085 - protein, 17 aa, Artificial
  CDR sequence
RIQPGGGSTSYADSVKG

SEQ ID NO: 1086 - protein, 16 aa, Artificial
  CDR sequence
AIVNGVWKNYADSVKG

SEQ ID NO: 1087 - protein, 16 aa, Artificial
  CDR sequence
TITFGGTTTYADSAKG

SEQ ID NO: 1088 - protein, 17 aa, Artificial
  CDR sequence
RIQPGGGSTSYADSVKG

SEQ ID NO: 1089 - protein, 17 aa, Artificial
  CDR sequence
AIEYSGGITDYKDSVKG

SEQ ID NO: 1090 - protein, 17 aa, Artificial
  CDR sequence
EIILSKGFTYYADSVKG

SEQ ID NO: 1091 - protein, 17 aa, Artificial
  CDR sequence
EIILSKDFTYYADSVKG

SEQ ID NO: 1092 - protein, 17 aa, Artificial
  CDR sequence
EIILSKGFTYYADSVKG

SEQ ID NO: 1093 - protein, 17 aa, Artificial
  CDR sequence
EIILSKGFTYYADSVKG

SEQ ID NO: 1094 - protein, 17 aa, Artificial
  CDR sequence
EIILSKGFTYYADSVKG

SEQ ID NO: 1095 - protein, 17 aa, Artificial
  CDR sequence
EIILSKGFTYYADSVKG

SEQ ID NO: 1096 - protein, 17 aa, Artificial
  CDR sequence
AISRSGGATYYPDSVKG

SEQ ID NO: 1097 - protein, 17 aa, Artificial
  CDR sequence
GISRSGSTTGYAGSVKG

SEQ ID NO: 1098 - protein, 17 aa, Artificial
  CDR sequence
CINNSDGSTYYIDSVKG

SEQ ID NO: 1099 - protein, 17 aa, Artificial
  CDR sequence
GISWSAGNTRYADSVKG

SEQ ID NO: 1100 - protein, 17 aa, Artificial
  CDR sequence
AVSWSAGNTRYANSVKG

SEQ ID NO: 1101 - protein, 17 aa, Artificial
  CDR sequence
SIRKGDGATYYADSVKG

SEQ ID NO: 1102 - protein, 17 aa, Artificial
  CDR sequence
SIRIGDYATYYADSVKG

SEQ ID NO: 1103 - protein, 17 aa, Artificial
  CDR sequence
SIRITDNATYYADSVKG

SEQ ID NO: 1104 - protein, 17 aa, Artificial
  CDR sequence
SIRIGDGATYYADSVKG

SEQ ID NO: 1105 - protein, 17 aa, Artificial
  CDR sequence
DISMEGTNTYYRDSVQG

SEQ ID NO: 1106 - protein, 17 aa, Artificial
  CDR sequence
SIRIGDSATFYADSVKG

SEQ ID NO: 1107 - protein, 17 aa, Artificial
  CDR sequence
SIRIGDNAAYYADSVKG

SEQ ID NO: 1108 - protein, 16 aa, Artificial
  CDR sequence
LITSFGLTVYADSVKG

SEQ ID NO: 1109 - protein, 17 aa, Artificial
  CDR sequence
SIRKGDGATYYADSVKG

SEQ ID NO: 1110 - protein, 20 aa, Artificial
  CDR sequence
ALRWSSGNIDYTYYADSVKG

SEQ ID NO: 1111 - protein, 17 aa, Artificial
  CDR sequence
AISWSGHMTYYKDSAKG

SEQ ID NO: 1112 - protein, 20 aa, Artificial
  CDR sequence
ALRWSSSNIDYTYYADSVKG

SEQ ID NO: 1113 - protein, 17 aa, Artificial
  CDR sequence
SIRIRDNAAYYADSVKG

SEQ ID NO: 1114 - protein, 17 aa, Artificial
  CDR sequence
SIRWSSEQTYYANSVKG

SEQ ID NO: 1115 - protein, 20 aa, Artificial
  CDR sequence
ALRWSSSNIDYTYYADSVKG

SEQ ID NO: 1116 - protein, 17 aa, Artificial
  CDR sequence
ALPWSAGIPQYSDSVKG

SEQ ID NO: 1117 - protein, 17 aa, Artificial
  CDR sequence
VISGTGDSAYYADSAKG

SEQ ID NO: 1118 - protein, 20 aa, Artificial
  CDR sequence
ATRWNGGSTYYVDYADSVKG

SEQ ID NO: 1119 - protein, 16 aa, Artificial
  CDR sequence
AVTGTGGTNYADSVKG

SEQ ID NO: 1120 - protein, 17 aa, Artificial
  CDR sequence
AIRWSDDFTYYADSVKG

SEQ ID NO: 1121 - protein, 16 aa, Artificial
  CDR sequence
RISRESGTSYADSVKD

SEQ ID NO: 1122 - protein, 16 aa, Artificial
  CDR sequence
RITRESDTTYADSVKD

SEQ ID NO: 1123 - protein, 17 aa, Artificial
  CDR sequence
CINRSDGTTAYADSVKG

SEQ ID NO: 1124 - protein, 17 aa, Artificial
  CDR sequence
SVSWNGGNKNYRSSVKG

SEQ ID NO: 1125 - protein, 16 aa, Artificial
  CDR sequence
SVDTGGSTLYADSVKG

SEQ ID NO: 1126 - protein, 17 aa, Artificial
  CDR sequence
ALPWSAGIPQYSDSVKG

SEQ ID NO: 1127 - protein, 17 aa, Artificial
  CDR sequence
AHRTSGISTVYAASVKG

SEQ ID NO: 1128 - protein, 17 aa, Artificial
  CDR sequence
AHRRNGISTVYAASVKG

SEQ ID NO: 1129 - protein, 17 aa, Artificial
  CDR sequence
AISWIGESTYYADSVKG

SEQ ID NO: 1130 - protein, 20 aa, Artificial
  CDR sequence
ATRWNGGSTYYADYADSVKG

SEQ ID NO: 1131 - protein, 17 aa, Artificial
  CDR sequence
AIRWSDTTTYYADSVKG

SEQ ID NO: 1132 - protein, 17 aa, Artificial
  CDR sequence
AVSRFGTITNYADSVQG

SEQ ID NO: 1133 - protein, 17 aa, Artificial
  CDR sequence
ALPWSAGIPQYSDSVKG

SEQ ID NO: 1134 - protein, 32 aa, Artificial
  framework sequence
RFTISRDDAKNTVALQMNSLKPEDTAIYYCAL

SEQ ID NO: 1135 - protein, 32 aa, Artificial; identical to SEQ ID NO: 1134
  framework sequence

SEQ ID NO: 1136 - protein, 32 aa, Artificial
  framework sequence
RFTISRDDAKNTVYLQMNSLKPEDTAIYYCAL

SEQ ID NO: 1137 - protein, 32 aa, Artificial; identical to SEQ ID NO: 1134
  framework sequence

SEQ ID NO: 1138 - protein, 32 aa, Artificial
  framework sequence
RFTISRDDAKNTVYLQMNSLKPEDTATYYCAL

SEQ ID NO: 1139 - protein, 32 aa, Artificial
  framework sequence
RFSISRDDAKNTVYLQMNSLKPEDTAIYYCAL

SEQ ID NO: 1140 - protein, 32 aa, Artificial
  framework sequence
RFTISRDDAKNTVYLQMNSLKPEDAAIYYCAL

SEQ ID NO: 1141 - protein, 32 aa, Artificial
  framework sequence
RFTISRDGAKNTVYLQMNSLKPEDTAIYYCAL

SEQ ID NO: 1142 - protein, 32 aa, Artificial
  framework sequence
RFTISRDNAQKTVYLQMNNLKPEDTAVYYCQT

SEQ ID NO: 1143 - protein, 32 aa, Artificial; identical to SEQ ID NO: 1142
  framework sequence

SEQ ID NO: 1144 - protein, 32 aa, Artificial
  framework sequence
RFTISLDNAANTVYLQMNSLKPEDTAVYICSG

SEQ ID NO: 1145 - protein, 32 aa, Artificial
  framework sequence
RFTISGDNAKNSVFLQMNGLKPEDTAVYYCAA

SEQ ID NO: 1146 - protein, 33 aa, Artificial
  framework sequence
GRFTISRDSAKSTVYVQMNNLKPEDTAVYFCAA

SEQ ID NO: 1147 - protein, 32 aa, Artificial
  framework sequence
RFTISRDNAKNTVYLQMNSLNSADTAVYSCAA

SEQ ID NO: 1148 - protein, 32 aa, Artificial
  framework sequence
RFTISRDNAKNTMYLQMNNLKPEDTAVYYCAA

SEQ ID NO: 1149 - protein, 32 aa, Artificial
  framework sequence
RFTISRDNAKNTVHLQMNSLELEDTALYYCAA

SEQ ID NO: 1150 - protein, 32 aa, Artificial
  framework sequence
RFTISRDNAKNTVYLQMNSLKPEDTAVYVCAA

SEQ ID NO: 1151 - protein, 32 aa, Artificial
  framework sequence
RFTISRDNAKTTVYLQMNSLKPEDTAVYYCAV

SEQ ID NO: 1152 - protein, 32 aa, Artificial
  framework sequence
RFTISRDNAKNTVYLQMNNLKPEDTAVYYCAA

SEQ ID NO: 1153 - protein, 32 aa, Artificial; identical to SEQ ID NO: 1152
  framework sequence

SEQ ID NO: 1154 - protein, 32 aa, Artificial
  framework sequence
RFTISRDNAKNTVYLQMNSLKPEDTAEYICTA

SEQ ID NO: 1155 - protein, 32 aa, Artificial
  framework sequence
RFTISRDNAKNTQSLQMNSLELEDTAIYYCAA

SEQ ID NO: 1156 - protein, 32 aa, Artificial; identical to SEQ ID NO: 1155
  framework sequence

SEQ ID NO: 1157 - protein, 32 aa, Artificial
  framework sequence
RFTISRDNAQNTMSLQMNSLELEDTAIYYCAH

SEQ ID NO: 1158 - protein, 32 aa, Artificial
  framework sequence
RFTISRDNAKNTMSLQMNSLKLEDTAIYYCAQ

SEQ ID NO: 1159 - protein, 32 aa, Artificial; identical to SEQ ID NO: 1155
  framework sequence

SEQ ID NO: 1160 - protein, 32 aa, Artificial
  framework sequence
RATISRDNAKNTMSLQMSSLELEDTAIYYCAH

SEQ ID NO: 1161 - protein, 32 aa, Artificial
  framework sequence
RFTISRVNAKNTMSLQMNSLELEDTAIYYCAA

SEQ ID NO: 1162 - protein, 32 aa, Artificial
  framework sequence
RFTISRDNAKNTMSLQMNSLELEDTAIYYCAA

SEQ ID NO: 1163 - protein, 32 aa, Artificial; identical to SEQ ID NO: 1160
  framework sequence

SEQ ID NO: 1164 - protein, 32 aa, Artificial
  framework sequence
RFTISRDNAKNTMSLQMNSLELEDTAIYYCAN

SEQ ID NO: 1165 - protein, 32 aa, Artificial; identical to SEQ ID NO: 1157
  framework sequence

SEQ ID NO: 1166 - protein, 32 aa, Artificial
  framework sequence
RFTISRDNAQNTMSLQTNSLELEDTAIYYCAH

SEQ ID NO: 1167 - protein, 32 aa, Artificial; identical to SEQ ID NO: 1157
  framework sequence

SEQ ID NO: 1168 - protein, 32 aa, Artificial
  framework sequence
RFTISRDNAKNTMSLQMSSLELEDTAIYYCAH

SEQ ID NO: 1169 - protein, 32 aa, Artificial
  framework sequence
RFTISRDNPKNTIYLQMNSLKPEDTAKYYCAA

SEQ ID NO: 1170 - protein, 32 aa, Artificial
  framework sequence
RFTISADNPKNTVYLQMNSLKPEDTAKYYCAA

SEQ ID NO: 1171 - protein, 32 aa, Artificial
  framework sequence
RFTISRDNVNNMVYLQMNSLNSEDTGVYYCAA

SEQ ID NO: 1172 - protein, 32 aa, Artificial
  framework sequence
RFTISRDNAKNTVYLQMNSLNSEDTAVYYCAA

SEQ ID NO: 1173 - protein, 32 aa, Artificial
  framework sequence
RFAISRDNAKNTAWLQMNSLKAEDTAVYYCAS

SEQ ID NO: 1174 - protein, 32 aa, Artificial
  framework sequence
RFAISRDNAKNTTWLQMNSLKAEDTAVYYCAS

SEQ ID NO: 1175 - protein, 32 aa, Artificial
  framework sequence
RFTISSDNAKNTVYLQMNSLRPEDTAVYYCAR

SEQ ID NO: 1176 - protein, 32 aa, Artificial; identical to SEQ ID NO: 1175
  framework sequence

SEQ ID NO: 1177 - protein, 32 aa, Artificial; identical to SEQ ID NO: 1175
  framework sequence

SEQ ID NO: 1178 - protein, 32 aa, Artificial; identical to SEQ ID NO: 1175
  framework sequence

SEQ ID NO: 1179 - protein, 32 aa, Artificial; identical to SEQ ID NO: 1175
  framework sequence

SEQ ID NO: 1180 - protein, 32 aa, Artificial
  framework sequence
RFTISRDNAKNTVYLQMNSLKPEDTAVYYCAK

SEQ ID NO: 1181 - protein, 32 aa, Artificial; identical to SEQ ID NO: 1180
  framework sequence

SEQ ID NO: 1182 - protein, 32 aa, Artificial
  framework sequence
RFTISRDNAKNTLYLQMNSLKPEDTALYYCST

SEQ ID NO: 1183 - protein, 32 aa, Artificial
  framework sequence
RFTISRDNAKNTLYLQMSSLKVEDTALYYCAR

SEQ ID NO: 1184 - protein, 32 aa, Artificial; identical to SEQ ID NO: 112
  framework sequence

SEQ ID NO: 1185 - protein, 32 aa, Artificial
  framework sequence
RFTISRDNAKNTIYLQMNSLKPEDTAVYYCAA

SEQ ID NO: 1186 - protein, 32 aa, Artificial; identical to SEQ ID NO: 1185
  framework sequence

SEQ ID NO: 1187 - protein, 32 aa, Artificial
  framework sequence
RFTISRDNAKNTLYLQMNSLKSEDTAVYYCAK

SEQ ID NO: 1188 - protein, 32 aa, Artificial; identical to SEQ ID NO: 112
  framework sequence

SEQ ID NO: 1189 - protein, 32 aa, Artificial
  framework sequence
RFTISRDNAKNTLYLQMNSLKPEDTALYYCAK

SEQ ID NO: 1190 - protein, 32 aa, Artificial
  framework sequence
RFTISRDNAKNTVFLQMNTLKPEDTAVYYCAA

SEQ ID NO: 1191 - protein, 32 aa, Artificial
  framework sequence
RFTISRDNYKNTVFLQMNTLKPEDTAVYYCAA

SEQ ID NO: 1192 - protein, 32 aa, Artificial
  framework sequence
RFTISRDNAKNTLYLQMNSLKPEDTALYYCAR

SEQ ID NO: 1193 - protein, 32 aa, Artificial
  framework sequence
RFTISRDDAKNTLYLQMNSLKPEDTAQYYCAR

SEQ ID NO: 1194 - protein, 32 aa, Artificial
  framework sequence
RFTISRDNAKNTLYLQMNNLKPEDTALYYCSR

SEQ ID NO: 1195 - protein, 32 aa, Artificial; identical to SEQ ID NO: 1192
  framework sequence

SEQ ID NO: 1196 - protein, 32 aa, Artificial
  framework sequence
RFTISRDNAKNTVYLQMNSLKPEDTAVYYCAT

SEQ ID NO: 1197 - protein, 32 aa, Artificial
  framework sequence
RFTISRDNAKNTVFLQMSSLKPEDTAVYYCAA

SEQ ID NO: 1198 - protein, 32 aa, Artificial
  framework sequence
RFTISRDNATNTVYLQMNSLKPEDTAVYRCAA

SEQ ID NO: 1199 - protein, 32 aa, Artificial; identical to SEQ ID NO: 112
  framework sequence

SEQ ID NO: 1200 - protein, 32 aa, Artificial
  framework sequence
RFTISRDNAKNTVYLQMSSLKPEDTANYYCAA

SEQ ID NO: 1201 - protein, 32 aa, Artificial
  framework sequence
RFTISRDNYKNTVYLQMNSLKPDDTAVYYCAA

SEQ ID NO: 1202 - protein, 32 aa, Artificial
  framework sequence
RFAISRDNAKNTVHLQMNSLKPEDTAVYYCAA

SEQ ID NO: 1203 - protein, 32 aa, Artificial; identical to SEQ ID NO: 1192
  framework sequence

SEQ ID NO: 1204 - protein, 32 aa, Artificial
  framework sequence
RFTISRDNYKNTVFLQMNSLKPEDTAVYFCAA

SEQ ID NO: 1205 - protein, 32 aa, Artificial
  framework sequence
RFSISRDNANNTVHLQMNKLKFEDTAVYYCAT

SEQ ID NO: 1206 - protein, 32 aa, Artificial
  framework sequence
RFTISRDNAKNTVYLQMDSLKPEDTAVYYCAA

SEQ ID NO: 1207 - protein, 32 aa, Artificial
  framework sequence
RFTISRDNAENTVYLQMNSLKPEDTAVYLCAR

SEQ ID NO: 1208 - protein, 32 aa, Artificial
  framework sequence
RFTISRHNAKNTVYLQMNSLKPEDTAVYYCAS

SEQ ID NO: 1209 - protein, 32 aa, Artificial
  framework sequence
RFTISRDNAKNTVYLQMSSLKPEDTAVYYCAA

SEQ ID NO: 1210 - protein, 32 aa, Artificial
  framework sequence
RFTISRDNAKNTVYLQMNSLKPEDTAIYYCAA

SEQ ID NO: 1211 - protein, 32 aa, Artificial
  framework sequence
RFTISRDNAKNTLYLQMNGLKPEDTALYYCAR

SEQ ID NO: 1212 - protein, 32 aa, Artificial
  framework sequence
RFTISRNNAKNTVYLQMNSLKPEDTAVYICAA

SEQ ID NO: 1213 - protein, 32 aa, Artificial
  framework sequence
RFTISRDSAKNTVYLQMSSLKPLDTAVYYCAA

SEQ ID NO: 1214 - protein, 32 aa, Artificial
  framework sequence
RFTISRDNTKNTVYLQMSSLKPEDTAVYLCAA

SEQ ID NO: 1215 - protein, 32 aa, Artificial
  framework sequence
RFTISRDNAKNTVYLQMNSLKPEDTAAYYCAA

SEQ ID NO: 1216 - protein, 32 aa, Artificial
  framework sequence
RFIIATDDAKNTVYLRMNSLKPEDTAVYYCAG

SEQ ID NO: 1217 - protein, 32 aa, Artificial
  framework sequence
RFTISRDNAKNTVYLQMNSLKPEDTAVYYCAS

SEQ ID NO: 1218 - protein, 32 aa, Artificial
  framework sequence
RFTISRDNAKNTLYLQMSSLKPEDTAVYYCAA

SEQ ID NO: 1219 - protein, 32 aa, Artificial
  framework sequence
RFTISRDGAKNTVYLQMNSLKPEDTAVYYCNA

SEQ ID NO: 1220 - protein, 32 aa, Artificial; identical to SEQ ID NO: 1207
  framework sequence

SEQ ID NO: 1221 - protein, 32 aa, Artificial
  framework sequence
RFTVSADNAKNTMYLQMNSLKPEDTAVYYCAG

SEQ ID NO: 1222 - protein, 32 aa, Artificial
  framework sequence
RFTISRDNAKNTVYLQMNSLKPTDTAVYYCAA

SEQ ID NO: 1223 - protein, 32 aa, Artificial
  framework sequence
RFTISRDNYKNTVYLQMNSLKPEDTAVYYCAS

SEQ ID NO: 1224 - protein, 32 aa, Artificial; identical to SEQ ID NO: 112
  framework sequence

SEQ ID NO: 1225 - protein, 32 aa, Artificial; identical to SEQ ID NO: 1209
  framework sequence

SEQ ID NO: 1226 - protein, 32 aa, Artificial
  framework sequence
RFTISRDNAKNTLYLEMSSLKVEDTALYYCAR

SEQ ID NO: 1227 - protein, 32 aa, Artificial
  framework sequence
RFTISRDNAKNTVYLQMNSLKPEDTATYYCAA

SEQ ID NO: 1228 - protein, 32 aa, Artificial
  framework sequence
RFTISRDNAKNTLYLQMNNLKPEDTALYYCAR

SEQ ID NO: 1229 - protein, 32 aa, Artificial; identical to SEQ ID NO: 1209
  framework sequence

SEQ ID NO: 1230 - protein, 32 aa, Artificial
  framework sequence
RFTISRDNAKNTVYLQMNRLKPEDTSIYYCAT

SEQ ID NO: 1231 - protein, 32 aa, Artificial
  framework sequence
RFTISRDNAKNTMSLQMNNLKPEDTAVYVCAT

SEQ ID NO: 1232 - protein, 32 aa, Artificial
  framework sequence
RFTISRDNAKNTLYLRMNSLKPEDTALYYCAR

SEQ ID NO: 1233 - protein, 32 aa, Artificial; identical to SEQ ID NO: 1209
  framework sequence

SEQ ID NO: 1234 - protein, 32 aa, Artificial; identical to SEQ ID NO: 1209
  framework sequence

SEQ ID NO: 1235 - protein, 32 aa, Artificial; identical to SEQ ID NO: 1192
  framework sequence

SEQ ID NO: 1236 - protein, 32 aa, Artificial
  framework sequence
RFTTSRDSQKNTVSLQMNSLKPEDTAVYYCAA

SEQ ID NO: 1237 - protein, 32 aa, Artificial; identical to SEQ ID NO: 1217
  framework sequence

SEQ ID NO: 1238 - protein, 32 aa, Artificial; identical to SEQ ID NO: 1209
  framework sequence

SEQ ID NO: 1239 - protein, 32 aa, Artificial; identical to SEQ ID NO: 1209
  framework sequence

SEQ ID NO: 1240 - protein, 32 aa, Artificial
  framework sequence
RFTISRDNAENTVYLQMSSLKPEDTAVYYCAA

SEQ ID NO: 1241 - protein, 32 aa, Artificial; identical to SEQ ID NO: 1197
  framework sequence

SEQ ID NO: 1242 - protein, 32 aa, Artificial
  framework sequence
RFTFSKDNAKNTLYLQMNSLKPEDTALYYCST

SEQ ID NO: 1243 - protein, 32 aa, Artificial; identical to SEQ ID NO: 1209
  framework sequence

SEQ ID NO: 1244 - protein, 32 aa, Artificial
  framework sequence
RFTISRDNAKNTLYLQMDNLAPEDTALYYCAR

SEQ ID NO: 1245 - protein, 32 aa, Artificial; identical to SEQ ID NO: 1209
  framework sequence

SEQ ID NO: 1246 - protein, 32 aa, Artificial
  framework sequence
RFTISRDSAKNTVYLQMSSLKPEDTAVYFCAA

SEQ ID NO: 1247 - protein, 32 aa, Artificial; identical to SEQ ID NO: 1192
  framework sequence

SEQ ID NO: 1248 - protein, 32 aa, Artificial; identical to SEQ ID NO: 1215
  framework sequence

SEQ ID NO: 1249 - protein, 32 aa, Artificial
  framework sequence
RFTISRDNAKNTLYLQMNSLKPEDTSLYYCAR

SEQ ID NO: 1250 - protein, 32 aa, Artificial
  framework sequence
RFTISRDNAKNTVYLQMGSLKPEDTAVYYCAA

SEQ ID NO: 1251 - protein, 32 aa, Artificial
  framework sequence
RFTISRDYAANTVYLQMNSLKPEDTAVYYCNA

SEQ ID NO: 1252 - protein, 32 aa, Artificial; identical to SEQ ID NO: 112
  framework sequence

SEQ ID NO: 1253 - protein, 32 aa, Artificial
  framework sequence
RFTVSRDNAKNTEYLQMNSLKSEDTAVYYCAA

SEQ ID NO: 1254 - protein, 32 aa, Artificial
  framework sequence
RFTISRDNAKSTVYLQMNSLKPEDTAVYSCAA

SEQ ID NO: 1255 - protein, 32 aa, Artificial
  framework sequence
RFTISRENAKSTVYLQMNSLKPEDTGVYYCNR

SEQ ID NO: 1256 - protein, 32 aa, Artificial
  framework sequence
RFTISRENAKSTVYLQMDSLKPEDTGVYYCNR

SEQ ID NO: 1257 - protein, 32 aa, Artificial
  framework sequence
RFTISRENAKSTVYLQMNSLKPEDTGVYFCNR

SEQ ID NO: 1258 - protein, 32 aa, Artificial
  framework sequence
RFTISRDNVKNMVYLQMNSLKPEDTAVYYCNK

SEQ ID NO: 1259 - protein, 32 aa, Artificial
  framework sequence
RFTISRDNAKNTVYLQMNSLKPEDTAVYYCNR

SEQ ID NO: 1260 - protein, 32 aa, Artificial; identical to SEQ ID NO: 1259
  framework sequence

SEQ ID NO: 1261 - protein, 32 aa, Artificial; identical to SEQ ID NO: 1255
  framework sequence

SEQ ID NO: 1262 - protein, 32 aa, Artificial
  framework sequence
  misc_feature (7)..(7): Unknown amino acid, most likely one of the Camelid amino acid residues mentioned for this specific position in Tables A-5 to A-8.
RFTISRXNAKSTVYLEMNSLKPEDTGVYYCNR

SEQ ID NO: 1263 - protein, 32 aa, Artificial
  framework sequence
  misc_feature (7)..(7): Unknown amino acid, most likely one of the Camelid amino acid residues mentioned for this specific position in Tables A-5 to A-8.
RFTISRXNAKSTVYLQMNSLKPEDTGVYYCNR

SEQ ID NO: 1264 - protein, 32 aa, Artificial
  framework sequence
RFTISRENAKSTVYLQMNSLKSEDTGVYYCNR

SEQ ID NO: 1265 - protein, 32 aa, Artificial; identical to SEQ ID NO: 1255
  framework sequence

SEQ ID NO: 1266 - protein, 32 aa, Artificial; identical to SEQ ID NO: 112
  framework sequence

SEQ ID NO: 1267 - protein, 32 aa, Artificial; identical to SEQ ID NO: 1209
  framework sequence

SEQ ID NO: 1268 - protein, 32 aa, Artificial
  framework sequence
RFTISRDNAKNTLYLQMNSLKPEDTALYYCAT

SEQ ID NO: 1269 - protein, 32 aa, Artificial
  framework sequence
RFTISRBNAKNTVYLQMNSLKPDDTAVYYCAA

SEQ ID NO: 1270 - protein, 32 aa, Artificial
  framework sequence
RFTISRDNAKNTVYLQMNSLKPDDTAVYYCAA

SEQ ID NO: 1271 - protein, 32 aa, Artificial; identical to SEQ ID NO: 112
  framework sequence

SEQ ID NO: 1272 - protein, 32 aa, Artificial
  framework sequence
RFTISRDNAKNTVYLQMSGLKPDDTAVYYCAA

SEQ ID NO: 1273 - protein, 32 aa, Artificial; identical to SEQ ID NO: 112
  framework sequence

SEQ ID NO: 1274 - protein, 32 aa, Artificial
  framework sequence
  misc_feature (13)..(13): Unknown amino acid, most likely one of the Camelid amino acid residues mentioned for this specific position in Tables A-5 to A-8.
  misc_feature (26)..(26): Unknown amino acid, most likely one of the Camelid amino acid residues mentioned for this specific position in Tables A-5 to A-8.
RFTISRBNAKNTXVLQMSSLKPEDTXVYYCAA

SEQ ID NO: 1275 - protein, 32 aa, Artificial
  framework sequence
RFTLSRDNAKNTLYLQMNSLTPDDAAVYYCAK

SEQ ID NO: 1276 - protein, 32 aa, Artificial
  framework sequence
RFTISRDNGKNTVYLQMNSLKPEDTAVYYCAA

SEQ ID NO: 1277 - protein, 32 aa, Artificial
  framework sequence
RFTISRDSAKNTVYLQMNSLKPEDTAVYYCNA

SEQ ID NO: 1278 - protein, 32 aa, Artificial
  framework sequence
RFTISTDNAKNMVYLQMNSLKPEDTAVYYCAA

SEQ ID NO: 1279 - protein, 32 aa, Artificial
  framework sequence
RFTVSRDNAKNTVYLQMNNLKPEDTAVYYCAA

SEQ ID NO: 1280 - protein, 32 aa, Artificial
  framework sequence
RFTISRDNAKNTLYLHMNSLKPEDTAVYYCTK

SEQ ID NO: 1281 - protein, 32 aa, Artificial
  framework sequence
RFTISRDNAKNTVNLQMNSLKPEDTAVYYCAA

SEQ ID NO: 1282 - protein, 32 aa, Artificial
  framework sequence
RFTISSDNAKNTVYLQMNSLKPEDTAVYYCAT

SEQ ID NO: 1283 - protein, 32 aa, Artificial
  framework sequence
RFAISRDDAKNTVYLEINTLKPEDTATYYCAR

SEQ ID NO: 1284 - protein, 32 aa, Artificial
  framework sequence
RFTISGDNAKNTVYLQMNRLEPEDTAVYHCAA

SEQ ID NO: 1285 - protein, 32 aa, Artificial
  framework sequence
RFTISSDNAKNTVYLQMNSLKPEDTAVYYCAA

SEQ ID NO: 1286 - protein, 32 aa, Artificial; identical to SEQ ID NO: 112
  framework sequence

SEQ ID NO: 1287 - protein, 32 aa, Artificial; identical to SEQ ID NO: 1196
  framework sequence

SEQ ID NO: 1288 - protein, 32 aa, Artificial
  framework sequence
RFTISRDNAKSTVYLQMNSLNTEDTAVYYCAA

SEQ ID NO: 1289 - protein, 32 aa, Artificial; identical to SEQ ID NO: 1152
  framework sequence

SEQ ID NO: 1290 - protein, 32 aa, Artificial
  framework sequence
RFTISRDDAKKTVHLEINNLKPEDTATYYCAR

SEQ ID NO: 1291 - protein, 32 aa, Artificial
  framework sequence
RVTISRDNAKNTVYLQMNSLKPGDTAVYYCAA

SEQ ID NO: 1292 - protein, 32 aa, Artificial; identical to SEQ ID NO: 112
  framework sequence

SEQ ID NO: 1293 - protein, 32 aa, Artificial
  framework sequence
RFTISRDNAKNTVDLQMNSLKPEDTAVYYCAA

SEQ ID NO: 1294 - protein, 32 aa, Artificial
  framework sequence
RFTISRDDDKNTVYLEINNLKPEDTATYYCAR

SEQ ID NO: 1295 - protein, 32 aa, Artificial
  framework sequence
RFTVSRDNAKNTVYLQMDSLKPEDTAVYYCAA

SEQ ID NO: 1296 - protein, 32 aa, Artificial
  framework sequence
RFTISKDNAKNTIYLQMNSLKPEDTAVYVCAA

SEQ ID NO: 1297 - protein, 32 aa, Artificial
  framework sequence
RFTISRDNAKNTVYLQMNSLKPEDTALYTCAA

SEQ ID NO: 1298 - protein, 32 aa, Artificial
  framework sequence
RFTISRDNARNTVYLQMDSLKPEDTAIYYCNF

SEQ ID NO: 1299 - protein, 32 aa, Artificial
  framework sequence
RFTISRDNAKNTGYLQMNSLKPEDTAVYYCAA

SEQ ID NO: 1300 - protein, 32 aa, Artificial; identical to SEQ ID NO: 112
  framework sequence

SEQ ID NO: 1301 - protein, 32 aa, Artificial; identical to SEQ ID NO: 112
  framework sequence

SEQ ID NO: 1302 - protein, 32 aa, Artificial; identical to SEQ ID NO: 112
  framework sequence

SEQ ID NO: 1303 - protein, 32 aa, Artificial
  framework sequence
RFTISRDNAKNTVYLQMNSLKPEDTAVYLCAA

SEQ ID NO: 1304 - protein, 32 aa, Artificial; identical to SEQ ID NO: 112
  framework sequence

SEQ ID NO: 1305 - protein, 32 aa, Artificial; identical to SEQ ID NO: 112
  framework sequence

SEQ ID NO: 1306 - protein, 32 aa, Artificial
  framework sequence
RFTISRDDAKNTVYLEINNLKPEDTATYYCAR

SEQ ID NO: 1307 - protein, 32 aa, Artificial
  framework sequence
RFTISRDNAANTVYLQMNSLKPEDTAVYYCAR

SEQ ID NO: 1308 - protein, 32 aa, Artificial; identical to SEQ ID NO: 1285
  framework sequence

SEQ ID NO: 1309 - protein, 32 aa, Artificial
  framework sequence
RFTISRDNARNTVYLQMDSLKPEDTAVYYCNF

SEQ ID NO: 1310 - protein, 32 aa, Artificial
  framework sequence
RFTISSDNAKNTVYLEMNSLKPEDTAVYYCAY

SEQ ID NO: 1311 - protein, 32 aa, Artificial
  framework sequence
RFTISSDNAKNTVYLQMNNLKPEDTADYYCAP

SEQ ID NO: 1312 - protein, 32 aa, Artificial
  framework sequence
RFTISRDNAKNTLYLQMNSLKPEDSAVYYCAA

SEQ ID NO: 1313 - protein, 32 aa, Artificial
  framework sequence
RFTISRDNAKNTVYLQMDNLKPEDTAVYYCAA

SEQ ID NO: 1314 - protein, 32 aa, Artificial; identical to SEQ ID NO: 1285
  framework sequence

SEQ ID NO: 1315 - protein, 32 aa, Artificial; identical to SEQ ID NO: 112
  framework sequence

SEQ ID NO: 1316 - protein, 32 aa, Artificial
  framework sequence
  misc_feature (26)..(26): Unknown amino acid, most likely one of the Camelid amino acid residues mentioned for this specific position in Tables A-5 to A-8.
  misc_feature (27)..(27): Unknown amino acid, most likely one of the Camelid amino acid residues mentioned for this specific position in Tables A-5 to A-8.
RFTISRBBAANTVTLQMTGLKPEDAXXYNCAI

SEQ ID NO: 1317 - protein, 33 aa, Artificial
  framework sequence
GRFTMSSDNAKNTVYLQMNSLKPEDTAVYYCAD

SEQ ID NO: 1318 - protein, 33 aa, Artificial
  framework sequence
  misc_feature (27)..(27): Unknown amino acid, most likely one of the Camelid amino acid residues mentioned for this specific position in Tables A-5 to A-8.
GRFTISRDNAKNTVYLQMNSLKPEDTXVYYCAA

SEQ ID NO: 1319 - protein, 33 aa, Artificial
  framework sequence
GRFTISRDNAKNTVYLQMNSLKPEDTAAYYCAA

SEQ ID NO: 1320 - protein, 33 aa, Artificial
  framework sequence
GRFTISSDNAKNTVYLQMNSLKPEDTAVYYCAA

SEQ ID NO: 1321 - protein, 32 aa, Artificial
  framework sequence
RFTISRDNDKNMVYLQMNSLKPEDTAVYYCGA

SEQ ID NO: 1322 - protein, 32 aa, Artificial
  framework sequence
RFTITSDNAKNTVYLQMNSLKPEDTAVYYCAA

SEQ ID NO: 1323 - protein, 32 aa, Artificial
  framework sequence
RFTISRDNDKKMVYLQMNSLKPEDTAVYYCGA

SEQ ID NO: 1324 - protein, 32 aa, Artificial
  framework sequence
RFTISRDNEKKMLYLQMDSLKPEDTAVYYCGA

SEQ ID NO: 1325 - protein, 32 aa, Artificial
  framework sequence
RFTISRDVPKNTVWLQMDSLKPDDTAVYYCAA

SEQ ID NO: 1326 - protein, 32 aa, Artificial
  framework sequence
RFTIAVDNAKNTVYLQMNSLNPEDTAVYYCAA

SEQ ID NO: 1327 - protein, 32 aa, Artificial
  framework sequence
RFIISRDNAKNTLYLQMNRLKPEDTAVYYCAA

SEQ ID NO: 1328 - protein, 32 aa, Artificial
  framework sequence
RFTISRDLAKNTLYLQMNRLKSDDTAVYYCAK

SEQ ID NO: 1329 - protein, 32 aa, Artificial
  framework sequence
RFTISRENAELTVYLQMNSLKPEDTAVYYCNV

SEQ ID NO: 1330 - protein, 32 aa, Artificial
  framework sequence
RFTIARENANNTVYLQMNSLKPEDTAVYHCNL

SEQ ID NO: 1331 - protein, 32 aa, Artificial
  framework sequence
RFTISRDRPTNTAYLQMSSLKPEDTAVYYCAA

SEQ ID NO: 1332 - protein, 32 aa, Artificial
  framework sequence
RFTISSDSAKNTVYLQMNSLRPEDTAVYYCSA

SEQ ID NO: 1333 - protein, 32 aa, Artificial
  framework sequence
RFTISSDSARNTVYLQMNSLRPEDTAVYSCSA

SEQ ID NO: 1334 - protein, 32 aa, Artificial
  framework sequence
RFTISRDNAKNTVYLQMNTLKPEDTAVYYCAA

SEQ ID NO: 1335 - protein, 32 aa, Artificial
  framework sequence
RFIIFRDNAKNTLYLQMNGLKPDDTAVYYCAR

SEQ ID NO: 1336 - protein, 32 aa, Artificial; identical to SEQ ID NO: 1285
  framework sequence

SEQ ID NO: 1337 - protein, 32 aa, Artificial; identical to SEQ ID NO: 1187
  framework sequence

SEQ ID NO: 1338 - protein, 32 aa, Artificial
  framework sequence
RFTISRDNAENTVYLQMNNLKPEDTAVYYCHA

SEQ ID NO: 1339 - protein, 32 aa, Artificial
  framework sequence
RFTISRDNAENTVYLQMNSLKPEDTAVYFCNA

SEQ ID NO: 1340 - protein, 32 aa, Artificial; identical to SEQ ID NO: 1187
  framework sequence

SEQ ID NO: 1341 - protein, 32 aa, Artificial
  framework sequence
RFTISKDNPKNTVFLQMDSLKPEDTAVYYCGL

SEQ ID NO: 1342 - protein, 34 aa, Artificial
  framework sequence
RFTISRANAKNTITMSLQMHSLKSEDTAVYYCAA

SEQ ID NO: 1343 - protein, 34 aa, Artificial
  framework sequence
RFTISRANAKNTITMYLQMSSLKSEDTAVYYCAA

SEQ ID NO: 1344 - protein, 34 aa, Artificial
  framework sequence
RFTISRANAKNTITMYLQMHSLKSEDSAVYYCAA

SEQ ID NO: 1345 - protein, 34 aa, Artificial
  framework sequence
RFTISRANAKNTITMYLQMNSLKSEDTAVYYCAA

SEQ ID NO: 1346 - protein, 34 aa, Artificial
  framework sequence
RFTISRVNAKNTITMYLQMNSLKSEDTAVYYCAG

SEQ ID NO: 1347 - protein, 34 aa, Artificial; identical to SEQ ID NO: 1345
  framework sequence

SEQ ID NO: 1348 - protein, 32 aa, Artificial
  framework sequence
RFAISRDNAKNTVNLQMNSLTPEDTAVYYCAA

SEQ ID NO: 1349 - protein, 32 aa, Artificial
  framework sequence
RFSISRDNAKNAVYLQMNSLKPEDTAVYYCAS

SEQ ID NO: 1350 - protein, 32 aa, Artificial
  framework sequence
RFTISKDSATNTVYLQMSSLKPEDTAVYYCAA

SEQ ID NO: 1351 - protein, 32 aa, Artificial
  framework sequence
RFTISRDIAKNTFDLQMNSLKPEDTAVYYCAA

SEQ ID NO: 1352 - protein, 32 aa, Artificial
  framework sequence
RFTISRDIAKNTFYLQMNSLKPEDTAVYYCVA

SEQ ID NO: 1353 - protein, 32 aa, Artificial
  framework sequence
RFSISRDNAKNMVYLQMNSLKPEDTAVYTCAA

SEQ ID NO: 1354 - protein, 32 aa, Artificial; identical to SEQ ID NO: 1353
  framework sequence

SEQ ID NO: 1355 - protein, 32 aa, Artificial
  framework sequence
RFSISRDNAKNMVFLQMNSLKPEDTAVYTCAA

SEQ ID NO: 1356 - protein, 32 aa, Artificial; identical to SEQ ID NO: 1353
  framework sequence

SEQ ID NO: 1357 - protein, 32 aa, Artificial
  framework sequence
RFTISRDNAKNILYLQMNSLKSEDTAVYYCAR

SEQ ID NO: 1358 - protein, 32 aa, Artificial
  framework sequence
RFSISRDNAKNMVYLQMNSLKPEDTAVYTCAG

SEQ ID NO: 1359 - protein, 32 aa, Artificial
  framework sequence
RFSISRDYAKNMVYLQMNSLKAEDTAVYTCAG

SEQ ID NO: 1360 - protein, 32 aa, Artificial
  framework sequence
RFTISRDNAYNTVYLQMNHLKFEDTAVYYCAA

SEQ ID NO: 1361 - protein, 32 aa, Artificial; identical to SEQ ID NO: 1353
  framework sequence

SEQ ID NO: 1362 - protein, 32 aa, Artificial
  framework sequence
RFSISGDYAKNTVYLQMNSLKAEDTAVYYCAA

SEQ ID NO: 1363 - protein, 32 aa, Artificial; identical to SEQ ID NO: 1152
  framework sequence

SEQ ID NO: 1364 - protein, 32 aa, Artificial; identical to SEQ ID NO: 1362
  framework sequence

SEQ ID NO: 1365 - protein, 32 aa, Artificial
  framework sequence
RFSISRDNHKNMVYLQMNSLKPEDTAVYTCAG

SEQ ID NO: 1366 - protein, 32 aa, Artificial
  framework sequence
RFSISRDNAKNAVYLEMNTLKPEDTAVYYCAL

SEQ ID NO: 1367 - protein, 32 aa, Artificial; identical to SEQ ID NO: 1362
  framework sequence

SEQ ID NO: 1368 - protein, 32 aa, Artificial
  framework sequence
  misc_feature (32)..(32): Unknown amino acid, most likely one of the Camelid amino acid residues mentioned for this specific position in Tables A-5 to A-8.
RFTISRDNAKNTVYLQMNNLKPEDTAVYYCAX

SEQ ID NO: 1369 - protein, 32 aa, Artificial
  framework sequence
RFTISRDNAKHTVYLQMNVLKPEDTALYYCAG

SEQ ID NO: 1370 - protein, 32 aa, Artificial
  framework sequence
RFTVSRDNVKNTMYLQMNSLKPEDTAGYYCAG

SEQ ID NO: 1371 - protein, 32 aa, Artificial
  framework sequence
RFSISRDNAKNTVYLQMNSLKPEDMGVYYCYM

SEQ ID NO: 1372 - protein, 32 aa, Artificial
  framework sequence
RFTISRDNAKNTVYLQMNSLKVEDTAVYYCAG

SEQ ID NO: 1373 - protein, 32 aa, Artificial
  framework sequence
RFTISRDNAKNTVYLQMNSLKPGDTAVYYCTA

SEQ ID NO: 1374 - protein, 32 aa, Artificial; identical to SEQ ID NO: 1373
  framework sequence

SEQ ID NO: 1375 - protein, 32 aa, Artificial
  framework sequence
RFTISRDKAKNTVYLQMNALRPEDTAVYSCAA

SEQ ID NO: 1376 - protein, 32 aa, Artificial
  framework sequence
RFTISRDNANDTVFLQMNSLKPEDTAVYYCSA

SEQ ID NO: 1377 - protein, 32 aa, Artificial
  framework sequence
RFTISRDSAKSMVYLQMNSLKPEDTAVYYCNV

SEQ ID NO: 1378 - protein, 32 aa, Artificial; identical to SEQ ID NO: 1152
  framework sequence

SEQ ID NO: 1379 - protein, 32 aa, Artificial
  framework sequence
RFTISRDNAKNTVYLGMKSLKPEDTAVYVCAA

SEQ ID NO: 1380 - protein, 32 aa, Artificial; identical to SEQ ID NO: 1379
  framework sequence

SEQ ID NO: 1381 - protein, 32 aa, Artificial
  framework sequence
RFTISRDNAKNTVYLRMNSLKPEDTAVYYCAA

SEQ ID NO: 1382 - protein, 32 aa, Artificial
  framework sequence
RFTVSRDNAKNTMYLQMNSLKPEDTAVYYCAG

SEQ ID NO: 1383 - protein, 32 aa, Artificial
  framework sequence
RFTASRDNAKNTMYLQMNSLKPMDTAVYYCAV

SEQ ID NO: 1384 - protein, 32 aa, Artificial
  framework sequence
RFTISRDNAKNTVYLQMTGLKFEDTAVYYCAA

SEQ ID NO: 1385 - protein, 32 aa, Artificial; identical to SEQ ID NO: 1368
  framework sequence
  misc_feature (32)..(32): Unknown amino acid, most likely one of the Camelid amino acid residues mentioned for this specific position in Tables A-5 to A-8.

SEQ ID NO: 1386 - protein, 21 aa, Artificial
  CDR sequence
RKGIPYSTSDRVIKGVNDYDY

SEQ ID NO: 1387 - protein, 21 aa, Artificial
  CDR sequence
RKGIPYSTSDRVIKGVNDYDY

SEQ ID NO: 1388 - protein, 21 aa, Artificial
  CDR sequence
RKGIPYSTSDRYIKGVNDYDY

SEQ ID NO: 1389 - protein, 21 aa, Artificial
  CDR sequence
RKGIPYSTSDRVIKGVNDYEY

SEQ ID NO: 1390 - protein, 21 aa, Artificial
  CDR sequence
RKGIPYSISDRVIKGVNDYDY

SEQ ID NO: 1391 - protein, 21 aa, Artificial
  CDR sequence
RKGTPYSTSYRVIKAVNDYEY

SEQ ID NO: 1392 - protein, 21 aa, Artificial
  CDR sequence
RKGIPYSTSNRYIKGVNDYDY

SEQ ID NO: 1393 - protein, 21 aa, Artificial
  CDR sequence
RKGIPYSTSSLYIKGVNDYDY

SEQ ID NO: 1394 - protein, 8 aa, Artificial
  CDR sequence
SGSGSPNF

SEQ ID NO: 1395 - protein, 8 aa, Artificial
  CDR sequence
SGSGSPNY

SEQ ID NO: 1396 - protein, 12 aa, Artificial
  CDR sequence
LLLNGGGTWQRL

SEQ ID NO: 1397 - protein, 21 aa, Artificial
  CDR sequence
QASGRVTYFDYAYRRGSNYDY

SEQ ID NO: 1398 - protein, 20 aa, Artificial
  CDR sequence
DRRTYYSEGPSLTDTLRYDY

SEQ ID NO: 1399 - protein, 19 aa, Artificial
  CDR sequence
PKRDLYLGSRYPVPESYDY

SEQ ID NO: 1400 - protein, 17 aa, Artificial
  CDR sequence
HRGDSIYYYTVWGKYDA

SEQ ID NO: 1401 - protein, 16 aa, Artificial
  CDR sequence
DRVSSSIQTMAGTYDY

SEQ ID NO: 1402 - protein, 15 aa, Artificial
  CDR sequence
PSGTLYTRNKSGYIY

SEQ ID NO: 1403 - protein, 10 aa, Artificial
  CDR sequence
RQILRREYDY

SEQ ID NO: 1404 - protein, 17 aa, Artificial
  CDR sequence
ADVSYGTTTDDPKRYDY

SEQ ID NO: 1405 - protein, 17 aa, Artificial
  CDR sequence
ADVSYGTTTDDPKRYDY

SEQ ID NO: 1406 - protein, 17 aa, Artificial
  CDR sequence
ADVSYGVTTDDPKRYDY

SEQ ID NO: 1407 - protein, 12 aa, Artificial
  CDR sequence
GRRSSVRSGYEF

SEQ ID NO: 1408 - protein, 12 aa, Artificial
  CDR sequence
GRRSSVRSGYEF

SEQ ID NO: 1409 - protein, 12 aa, Artificial
  CDR sequence
GRRSSGRSGYEY

SEQ ID NO: 1410 - protein, 14 aa, Artificial
  CDR sequence
GRRSSGRSGSGYEY

SEQ ID NO: 1411 - protein, 12 aa, Artificial
  CDR sequence
GRRSSARSGYEF

SEQ ID NO: 1412 - protein, 14 aa, Artificial
  CDR sequence
GRRSSGRSASGYEY

SEQ ID NO: 1413 - protein, 14 aa, Artificial
  CDR sequence
GRRSSGRSGSGYEY

SEQ ID NO: 1414 - protein, 12 aa, Artificial
  CDR sequence
GRRSSGRSGYEY

SEQ ID NO: 1415 - protein, 14 aa, Artificial
  CDR sequence
GRRSSGRSASGYEY

SEQ ID NO: 1416 - protein, 14 aa, Artificial
  CDR sequence
GRRSSARSGANYEY

SEQ ID NO: 1417 - protein, 12 aa, Artificial
  CDR sequence
GRRSSGRSGYEY

SEQ ID NO: 1418 - protein, 12 aa, Artificial
  CDR sequence
GRRSSGRSGYEY

SEQ ID NO: 1419 - protein, 12 aa, Artificial
  CDR sequence
GRRSSGRSGYEY

SEQ ID NO: 1420 - protein, 12 aa, Artificial
  CDR sequence
GRRSSGRSGYEY

SEQ ID NO: 1421 - protein, 14 aa, Artificial
  CDR sequence
  misc_feature (11)..(11): Xaa can be any naturally occurring amino acid
SISKGSTSYRXYGF

SEQ ID NO: 1422 - protein, 14 aa, Artificial
  CDR sequence
SIAKGSRSSRSYGY

SEQ ID NO: 1423 - protein, 18 aa, Artificial
  CDR sequence
DQDRSYGSIGMLPNEYDY

SEQ ID NO: 1424 - protein, 18 aa, Artificial
  CDR sequence
DQDRSYGSIGTLPNDYDY

SEQ ID NO: 1425 - protein, 19 aa, Artificial
  CDR sequence
GERSSYIGSNYYRTNEYDY

SEQ ID NO: 1426 - protein, 19 aa, Artificial
  CDR sequence
GERSTYIGSNYYRTNEYDY

SEQ ID NO: 1427 - protein, 16 aa, Artificial
  CDR sequence
VRTGWGLNAPDYAMDY

SEQ ID NO: 1428 - protein, 16 aa, Artificial
  CDR sequence
VRTGWGLNAPDYAMDY

SEQ ID NO: 1429 - protein, 16 aa, Artificial
  CDR sequence
VRTGWGLRAPDYAMDY

SEQ ID NO: 1430 - protein, 16 aa, Artificial
  CDR sequence
VRTGWGLNAPDYAMDY

SEQ ID NO: 1431 - protein, 16 aa, Artificial
  CDR sequence
VRTGWGLNAPDYAMDY

SEQ ID NO: 1432 - protein, 19 aa, Artificial
  CDR sequence
DPSPYYRGSAYLLSGSYDS

SEQ ID NO: 1433 - protein, 19 aa, Artificial
  CDR sequence
DPSPYYRGSAYLLSGSYDS

SEQ ID NO: 1434 - protein, 6 aa, Artificial
  CDR sequence
DYAGTV

SEQ ID NO: 1435 - protein, 6 aa, Artificial
  CDR sequence
DYQGAV

SEQ ID NO: 1436 - protein, 16 aa, Artificial
  CDR sequence
SARFGSGSYYDLMYDY

SEQ ID NO: 1437 - protein, 16 aa, Artificial
  CDR sequence
SDLYGSGSNYDLMYDY

SEQ ID NO: 1438 - protein, 16 aa, Artificial
  CDR sequence
SGLYGSGSVYDLMYDY

SEQ ID NO: 1439 - protein, 8 aa, Artificial
  CDR sequence
DWGASTFV

SEQ ID NO: 1440 - protein, 18 aa, Artificial
  CDR sequence
DGRSSFGIAKRSRYEYDS

SEQ ID NO: 1441 - protein, 6 aa, Artificial
  CDR sequence
DYAGRL

SEQ ID NO: 1442 - protein, 17 aa, Artificial
  CDR sequence
ADRGGGWLVVRENDYDY

SEQ ID NO: 1443 - protein, 17 aa, Artificial
  CDR sequence
ANRGGGWLTVRENDYDY

SEQ ID NO: 1444 - protein, 6 aa, Artificial
  CDR sequence
DWAGTV

SEQ ID NO: 1445 - protein, 6 aa, Artificial
  CDR sequence
DYAGRL

SEQ ID NO: 1446 - protein, 6 aa, Artificial
  CDR sequence
DYAGTV

SEQ ID NO: 1447 - protein, 6 aa, Artificial
  CDR sequence
DLGGAV

SEQ ID NO: 1448 - protein, 15 aa, Artificial
  CDR sequence
RESGELRIREYEYDY

SEQ ID NO: 1449 - protein, 14 aa, Artificial
  CDR sequence
GWLYPSSSSRDYDY

SEQ ID NO: 1450 - protein, 20 aa, Artificial
  CDR sequence
VVDYYCPGYESGVFRYGMDY

SEQ ID NO: 1451 - protein, 17 aa, Artificial
  CDR sequence
ALRGTSSDWRAAATYDD

SEQ ID NO: 1452 - protein, 14 aa, Artificial
  CDR sequence
GWLYPSSRSRDYDY

SEQ ID NO: 1453 - protein, 17 aa, Artificial
  CDR sequence
DTLHGGAVTTTPARYDY

SEQ ID NO: 1454 - protein, 15 aa, Artificial
  CDR sequence
GRFSYSTRIPNDYAY

SEQ ID NO: 1455 - protein, 6 aa, Artificial
  CDR sequence
DFSGNQ

SEQ ID NO: 1456 - protein, 15 aa, Artificial
  CDR sequence
RGSGELRLREYEYDY

SEQ ID NO: 1457 - protein, 15 aa, Artificial
  CDR sequence
DFNGGERRVPASYDS

SEQ ID NO: 1458 - protein, 10 aa, Artificial
  CDR sequence
RDLRGLRVDY

SEQ ID NO: 1459 - protein, 18 aa, Artificial
  CDR sequence
KRFQYIFGSQQPESDFDS

SEQ ID NO: 1460 - protein, 15 aa, Artificial
  CDR sequence
RPGGGLWTQTHEYAY

SEQ ID NO: 1461 - protein, 14 aa, Artificial
  CDR sequence
GWLYPSSRSRDYDY

SEQ ID NO: 1462 - protein, 19 aa, Artificial
  CDR sequence
TTYISGTYYYLTKQDMYAY

SEQ ID NO: 1463 - protein, 6 aa, Artificial
  CDR sequence
DSSGNL

SEQ ID NO: 1464 - protein, 15 aa, Artificial
  CDR sequence
DVSGWAHKGAKEYEY

SEQ ID NO: 1465 - protein, 14 aa, Artificial
  CDR sequence
GRLFPSSRSRDYDY

SEQ ID NO: 1466 - protein, 14 aa, Artificial
  CDR sequence
GWLFPSSRSRDYDY

SEQ ID NO: 1467 - protein, 14 aa, Artificial
  CDR sequence
GQRYLSRVSQGYEY

SEQ ID NO: 1468 - protein, 14 aa, Artificial
  CDR sequence
YSSGSYYSPRSYGV

SEQ ID NO: 1469 - protein, 19 aa, Artificial
  CDR sequence
SNSRCIGDGCYDEPHEYAY

SEQ ID NO: 1470 - protein, 15 aa, Artificial
  CDR sequence
ATFYTTSTYISLYDY

SEQ ID NO: 1471 - protein, 15 aa, Artificial
  CDR sequence
VGERLANTGVTEYDY

SEQ ID NO: 1472 - protein, 18 aa, Artificial
  CDR sequence
KRFQYIFGSQQPESDFDS

SEQ ID NO: 1473 - protein, 15 aa, Artificial
  CDR sequence
AGFYTTGTYYSLYDY

SEQ ID NO: 1474 - protein, 15 aa, Artificial
  CDR sequence
KGSGDLRLREYEYDY

SEQ ID NO: 1475 - protein, 15 aa, Artificial
  CDR sequence
RAGGGLWTQTHEYVD

SEQ ID NO: 1476 - protein, 15 aa, Artificial
  CDR sequence
RGSGELRLREYEYDY

SEQ ID NO: 1477 - protein, 14 aa, Artificial
  CDR sequence
GRLFPSSRSRDYDY

SEQ ID NO: 1478 - protein, 6 aa, Artificial
  CDR sequence
DYQGVV

SEQ ID NO: 1479 - protein, 16 aa, Artificial
  CDR sequence
KPYGRVFYTEGSNYDF

SEQ ID NO: 1480 - protein, 6 aa, Artificial
  CDR sequence
DFEGTV

SEQ ID NO: 1481 - protein, 14 aa, Artificial
  CDR sequence
GRLYPSSRSRDYDY

SEQ ID NO: 1482 - protein, 20 aa, Artificial
  CDR sequence
DRGGHFSVGYYYPSDDSWDY

SEQ ID NO: 1483 - protein, 14 aa, Artificial
  CDR sequence
GLLFPSSAERNYDY

SEQ ID NO: 1484 - protein, 6 aa, Artificial
  CDR sequence
DYAGRL

SEQ ID NO: 1485 - protein, 14 aa, Artificial
  CDR sequence
GRLYPSSRSRDYDY

SEQ ID NO: 1486 - protein, 14 aa, Artificial
  CDR sequence
GQLFPSSNSRDYDY

SEQ ID NO: 1487 - protein, 6 aa, Artificial
  CDR sequence
DWDGTV

SEQ ID NO: 1488 - protein, 17 aa, Artificial
  CDR sequence
NRFGYGSAAYTPDNYNY

SEQ ID NO: 1489 - protein, 19 aa, Artificial
  CDR sequence
SESRCIGDGCYDEPHEYAY

SEQ ID NO: 1490 - protein, 14 aa, Artificial
  CDR sequence
GALFPSSRSRDYDY

SEQ ID NO: 1491 - protein, 14 aa, Artificial
  CDR sequence
GQLFPSSRPRDYDY

SEQ ID NO: 1492 - protein, 14 aa, Artificial
  CDR sequence
GRLFPSSRSRDYDY

SEQ ID NO: 1493 - protein, 14 aa, Artificial
  CDR sequence
GWLFPSSLSRDYDF

SEQ ID NO: 1494 - protein, 6 aa, Artificial
  CDR sequence
DYAGTV

SEQ ID NO: 1495 - protein, 14 aa, Artificial
  CDR sequence
GQLFPSSHSRDYDY

SEQ ID NO: 1496 - protein, 6 aa, Artificial
  CDR sequence
DIGGAV

SEQ ID NO: 1497 - protein, 14 aa, Artificial
  CDR sequence
GQLFPSSRSRDYDY

SEQ ID NO: 1498 - protein, 14 aa, Artificial
  CDR sequence
GQLYPSSASRDYDY

SEQ ID NO: 1499 - protein, 6 aa, Artificial
  CDR sequence
DWAGTV

SEQ ID NO: 1500 - protein, 14 aa, Artificial
  CDR sequence
GQRYLSRVSQGYEY

SEQ ID NO: 1501 - protein, 6 aa, Artificial
  CDR sequence
DLGGAL

SEQ ID NO: 1502 - protein, 15 aa, Artificial
  CDR sequence
DVSGWAHKGAKEYEY

SEQ ID NO: 1503 - protein, 7 aa, Artificial
  CDR sequence
PNNYYGD

SEQ ID NO: 1504 - protein, 19 aa, Artificial
  CDR sequence
GPTWTQRNDRSWIFYEYDY

SEQ ID NO: 1505 - protein, 16 aa, Artificial
  CDR sequence
RSRDEFYYADDARYVY

SEQ ID NO: 1506 - protein, 16 aa, Artificial
  CDR sequence
PRYERMMSRLEVDYGY

SEQ ID NO: 1507 - protein, 6 aa, Artificial
  CDR sequence
LINEAS

SEQ ID NO: 1508 - protein, 6 aa, Artificial
  CDR sequence
LINEAS

SEQ ID NO: 1509 - protein, 6 aa, Artificial
  CDR sequence
LINEAS

SEQ ID NO: 1510 - protein, 6 aa, Artificial
  CDR sequence
ILHSDY

SEQ ID NO: 1511 - protein, 6 aa, Artificial
  CDR sequence
IVVESQ

SEQ ID NO: 1512 - protein, 6 aa, Artificial
  CDR sequence
IVVESQ

SEQ ID NO: 1513 - protein, 6 aa, Artificial
  CDR sequence
LINEAS

SEQ ID NO: 1514 - protein, 6 aa, Artificial
  CDR sequence
LINEAS

SEQ ID NO: 1515 - protein, 6 aa, Artificial
  CDR sequence
LINEAS

SEQ ID NO: 1516 - protein, 6 aa, Artificial
  CDR sequence
LINEAS

SEQ ID NO: 1517 - protein, 6 aa, Artificial
  CDR sequence
LINEAS

SEQ ID NO: 1518 - protein, 19 aa, Artificial
  CDR sequence
RSAYASGIYYYTREVSYNY

SEQ ID NO: 1519 - protein, 14 aa, Artificial
  CDR sequence
  misc_feature (7)..(7): Xaa can be any naturally occurring amino acid
GQLFPSXHSRDYDY

SEQ ID NO: 1520 - protein, 6 aa, Artificial
  CDR sequence
DIQGTT

SEQ ID NO: 1521 - protein, 15 aa, Artificial
  CDR sequence
DRYYYCSGWPDESAY

SEQ ID NO: 1522 - protein, 15 aa, Artificial
  CDR sequence
DRYYYCSGWPDESAY

SEQ ID NO: 1523 - protein, 15 aa, Artificial
  CDR sequence
DRYYYCSGWPDESAY

SEQ ID NO: 1524 - protein, 14 aa, Artificial
  CDR sequence
GWLYPSSRSRDYDY

SEQ ID NO: 1525 - protein, 15 aa, Artificial
  CDR sequence
DRYYYCSGWPDENAY

SEQ ID NO: 1526 - protein, 14 aa, Artificial
  CDR sequence
  misc_feature (6)..(6): Xaa can be any naturally occurring amino acid
GWLFPXSRSRDYDY

SEQ ID NO: 1527 - protein, 12 aa, Artificial
  CDR sequence
PRAGMAVYEYDA

SEQ ID NO: 1528 - protein, 18 aa, Artificial
  CDR sequence
DQDPQELLPFGLANEYDY

SEQ ID NO: 1529 - protein, 15 aa, Artificial
  CDR sequence
VGERLAYTGVTEYDY

SEQ ID NO: 1530 - protein, 15 aa, Artificial
  CDR sequence
MKMCTRAFYGDPVDY

SEQ ID NO: 1531 - protein, 11 aa, Artificial
  CDR sequence
  misc_feature (3)..(3): Xaa can be any naturally occurring amino acid
SLXGSLTEYDY

SEQ ID NO: 1532 - protein, 9 aa, Artificial
  CDR sequence
GRGDTRYDY

SEQ ID NO: 1533 - protein, 15 aa, Artificial
  CDR sequence
QDGRGILTRANHYDY

SEQ ID NO: 1534 - protein, 19 aa, Artificial
  CDR sequence
GLLDCPQRYGSSWYKGIGY

SEQ ID NO: 1535 - protein, 17 aa, Artificial
  CDR sequence
RRAPYYHISRRTDEYDF

SEQ ID NO: 1536 - protein, 15 aa, Artificial
  CDR sequence
SAIPVVVTTPEEYDY

SEQ ID NO: 1537 - protein, 19 aa, Artificial
  CDR sequence
YYKPWKYYCSDYGSYEHDA

SEQ ID NO: 1538 - protein, 15 aa, Artificial
  CDR sequence
RLSGWTSSRDKDYGY

SEQ ID NO: 1539 - protein, 21 aa, Artificial
  CDR sequence
PPYSDSYCLHREWVGLVPDDY

SEQ ID NO: 1540 - protein, 14 aa, Artificial
  CDR sequence
DRDVWVLSEHLYDY

SEQ ID NO: 1541 - protein, 15 aa, Artificial
  CDR sequence
AEGSTWYLESNLYNH

SEQ ID NO: 1542 - protein, 17 aa, Artificial
  CDR sequence
RRMPYYHISRRADEYDF

SEQ ID NO: 1543 - protein, 15 aa, Artificial
  CDR sequence
RLSGWTSSRDYDYDY

SEQ ID NO: 1544 - protein, 15 aa, Artificial
  CDR sequence
AEGSTWYLQPNLYNL

SEQ ID NO: 1545 - protein, 15 aa, Artificial
  CDR sequence
SLTGWIPSSLQSYNY

SEQ ID NO: 1546 - protein, 17 aa, Artificial
  CDR sequence
RRMPYYHISRRTDEYDF

SEQ ID NO: 1547 - protein, 15 aa, Artificial
  CDR sequence
RLSGWTSSRDYDYNY

SEQ ID NO: 1548 - protein, 13 aa, Artificial
  CDR sequence
ERGKYATTGNYDY

SEQ ID NO: 1549 - protein, 16 aa, Artificial
  CDR sequence
RWRPQVDYVDHWSYTY

SEQ ID NO: 1550 - protein, 4 aa, Artificial
  CDR sequence
  misc_feature (4)..(4): This CDR only comprises 3 amino acid residues (EDY). The residue marked Xaa is not present in the actual sequence and was only added because PatentIn 3.4 requires that an entered sequence contains at least 4 amino acid residues.
EDYX

SEQ ID NO: 1551 - protein, 15 aa, Artificial
  CDR sequence
TTYSSYTTSGLLYPY

SEQ ID NO: 1552 - protein, 17 aa, Artificial
  CDR sequence
LRWGCTLYGDYEGPYDY

SEQ ID NO: 1553 - protein, 19 aa, Artificial
  CDR sequence
VPYRTCEGYDYIHYYPDDY

SEQ ID NO: 1554 - protein, 15 aa, Artificial
  CDR sequence
RLSGWTSSRDYDYNY

SEQ ID NO: 1555 - protein, 8 aa, Artificial
  CDR sequence
GTMRAYNY

SEQ ID NO: 1556 - protein, 15 aa, Artificial
  CDR sequence
ALTGWIEARAEKYNY

SEQ ID NO: 1557 - protein, 21 aa, Artificial
  CDR sequence
DLLRHRMSGWGPYWFLYEYDY

SEQ ID NO: 1558 - protein, 17 aa, Artificial
  CDR sequence
RRMPYYHISRRTDEYDF

SEQ ID NO: 1559 - protein, 13 aa, Artificial
  CDR sequence
SSSGWMRARDFTS

SEQ ID NO: 1560 - protein, 23 aa, Artificial
  CDR sequence
LPLPHCPPPPSLYYSGSFYPDDY

SEQ ID NO: 1561 - protein, 4 aa, Artificial
  CDR sequence
  misc_feature (4)..(4): This CDR only comprises 3 amino acid residues (GDY). The residue marked X is not present in the actual sequence and was only added because PatentIn 3.4 requires that an entered sequence contains at least 4 amino acid residues.
  misc_feature (4)..(4): This CDR only comprises 3 amino acid residues (GDY). The residue marked Xaa is not present in the actual sequence and was only added because PatentIn 3.4 requires that an entered sequence contains at least 4 amino acid residues.
GDYX

SEQ ID NO: 1562 - protein, 14 aa, Artificial
  CDR sequence
LRWGCSLYLTDYDY

SEQ ID NO: 1563 - protein, 20 aa, Artificial
  CDR sequence
FSATCNGDSSWWSVSRYFGS

SEQ ID NO: 1564 - protein, 14 aa, Artificial
  CDR sequence
DRRHGDVVAARASS

SEQ ID NO: 1565 - protein, 20 aa, Artificial
  CDR sequence
STSGNAWFTVYYSTLGEYDY

SEQ ID NO: 1566 - protein, 14 aa, Artificial
  CDR sequence
LRFGCSYYYTEYDY

SEQ ID NO: 1567 - protein, 14 aa, Artificial
  CDR sequence
DRRAGDLVRYEYDY

SEQ ID NO: 1568 - protein, 22 aa, Artificial
  CDR sequence
  misc_feature (8)..(8): Xaa can be any naturally occurring amino acid
  misc_feature (13)..(13): Xaa can be any naturally occurring amino acid
  misc_feature (19)..(19): Xaa can be any naturally occurring amino acid
EWACTAKXGTSRXDWRQWXYVD

SEQ ID NO: 1569 - protein, 13 aa, Artificial
  CDR sequence
CDTVDGIWYQEGS

SEQ ID NO: 1570 - protein, 23 aa, Artificial
  CDR sequence
QPTYCETLLRVGEWPGGIIPYDY

SEQ ID NO: 1571 - protein, 23 aa, Artificial
  CDR sequence
TMYNGVVATAQFMGDMSADWYNY

SEQ ID NO: 1572 - protein, 18 aa, Artificial
  CDR sequence
ITWDTVVRTAPFEYEPDY

SEQ ID NO: 1573 - protein, 10 aa, Artificial
  CDR sequence
GRSMTGDVAY

SEQ ID NO: 1574 - protein, 14 aa, Artificial
  CDR sequence
DPTSGLPSDDEYDY

SEQ ID NO: 1575 - protein, 10 aa, Artificial
  CDR sequence
GRSMAGDVAY

SEQ ID NO: 1576 - protein, 10 aa, Artificial
  CDR sequence
GRSMAGDVAY

SEQ ID NO: 1577 - protein, 9 aa, Artificial
  CDR sequence
VKVAGSYEY

SEQ ID NO: 1578 - protein, 14 aa, Artificial
  CDR sequence
GAIMFPSRPRDFDF

SEQ ID NO: 1579 - protein, 14 aa, Artificial
  CDR sequence
RPDRVIVKWDEYDY

SEQ ID NO: 1580 - protein, 8 aa, Artificial
  CDR sequence
DWEMAAPS

SEQ ID NO: 1581 - protein, 12 aa, Artificial
  CDR sequence
WINTDGIYTYEY

SEQ ID NO: 1582 - protein, 5 aa, Artificial
  CDR sequence
HGTRF

SEQ ID NO: 1583 - protein, 13 aa, Artificial
  CDR sequence
DKISRGIDPNWTY

SEQ ID NO: 1584 - protein, 4 aa, Artificial
  CDR sequence
  misc_feature (4)..(4): This CDR only comprises 3 amino acid residues (LEY). The residue marked Xaa is not present in the actual sequence and was only added because PatentIn 3.4 requires that an entered sequence contains at least 4 amino acid residues.
LEYX

SEQ ID NO: 1585 - protein, 4 aa, Artificial
  CDR sequence
  misc_feature (4)..(4): This CDR only comprises 3 amino acid residues (LEY). The residue marked Xaa is not present in the actual sequence and was only added because PatentIn 3.4 requires that an entered sequence contains at least 4 amino acid residues.
LEYX

SEQ ID NO: 1586 - protein, 16 aa, Artificial
  CDR sequence
DAPPFGPYYRESVYDY

SEQ ID NO: 1587 - protein, 13 aa, Artificial
  CDR sequence
RVGTYETVLGYDK

SEQ ID NO: 1588 - protein, 25 aa, Artificial
  CDR sequence
PLLRGGCPITYYSGSYPHVYHAMDY

SEQ ID NO: 1589 - protein, 8 aa, Artificial
  CDR sequence
DWEMAAPS

SEQ ID NO: 1590 - protein, 7 aa, Artificial
  CDR sequence
KRGVSDY

SEQ ID NO: 1591 - protein, 17 aa, Artificial
  CDR sequence
DRILYVSEGLYRTEVDS

SEQ ID NO: 1592 - protein, 8 aa, Artificial
  CDR sequence
DWEMAAPS

SEQ ID NO: 1593 - protein, 14 aa, Artificial
  CDR sequence
TRVVGARNPGDYAY

SEQ ID NO: 1594 - protein, 16 aa, Artificial
  CDR sequence
RQNWSGNPTRPNEYEY

SEQ ID NO: 1595 - protein, 16 aa, Artificial
  CDR sequence
RQNWSGHPARTNEYEY

SEQ ID NO: 1596 - protein, 16 aa, Artificial
  CDR sequence
RQNWSGGPTRTNEYEY

SEQ ID NO: 1597 - protein, 16 aa, Artificial
  CDR sequence
RQNWSGNPTRTNEYEY

SEQ ID NO: 1598 - protein, 16 aa, Artificial
  CDR sequence
RQNWSGSPARTNEYEY

SEQ ID NO: 1599 - protein, 16 aa, Artificial
  CDR sequence
RQNWSGNPTRTNEYEY

SEQ ID NO: 1600 - protein, 15 aa, Artificial
  CDR sequence
ALGGVYNAIANDYKY

SEQ ID NO: 1601 - protein, 18 aa, Artificial
  CDR sequence
KRSPYTGIYYSDLSQSED

SEQ ID NO: 1602 - protein, 16 aa, Artificial
  CDR sequence
DSWCTVVAGKIHPFDS

SEQ ID NO: 1603 - protein, 15 aa, Artificial
  CDR sequence
DRRYGGSLDPSAWDF

SEQ ID NO: 1604 - protein, 15 aa, Artificial
  CDR sequence
DRRYGGSLDPSAWDF

SEQ ID NO: 1605 - protein, 16 aa, Artificial
  CDR sequence
RYDTLLGGGRPREFPY

SEQ ID NO: 1606 - protein, 16 aa, Artificial
  CDR sequence
RYDSHLGGGRPREFPY

SEQ ID NO: 1607 - protein, 16 aa, Artificial
  CDR sequence
RYETLLGGGRPREFPY

SEQ ID NO: 1608 - protein, 16 aa, Artificial
  CDR sequence
RYDTLLGGGRPREFPY

SEQ ID NO: 1609 - protein, 15 aa, Artificial
  CDR sequence
AKNEGFVPGGYDFDY

SEQ ID NO: 1610 - protein, 16 aa, Artificial
  CDR sequence
RYDTLLGGGRPREFPY

SEQ ID NO: 1611 - protein, 16 aa, Artificial
  CDR sequence
RYDSNLGGGRPREFPY

SEQ ID NO: 1612 - protein, 10 aa, Artificial
  CDR sequence
GQQDSSNYNS

SEQ ID NO: 1613 - protein, 16 aa, Artificial
  CDR sequence
RYDTLLGGGRPREFPY

SEQ ID NO: 1614 - protein, 15 aa, Artificial
  CDR sequence
STRWGVMESDTEYTS

SEQ ID NO: 1615 - protein, 17 aa, Artificial
  CDR sequence
RNRDYWSDFDVPGRYAY

SEQ ID NO: 1616 - protein, 15 aa, Artificial
  CDR sequence
STSWGVLESDTEYTS

SEQ ID NO: 1617 - protein, 16 aa, Artificial
  CDR sequence
RYDTLLGGGRPREFPY

SEQ ID NO: 1618 - protein, 13 aa, Artificial
  CDR sequence
GTSFSALPKLYNY

SEQ ID NO: 1619 - protein, 15 aa, Artificial
  CDR sequence
STRWGVMESDTEYTS

SEQ ID NO: 1620 - protein, 12 aa, Artificial
  CDR sequence
  misc_feature (10)..(10): Xaa can be any naturally occurring amino acid
KGRDDSYQPXNY

SEQ ID NO: 1621 - protein, 16 aa, Artificial
  CDR sequence
PCMVLGERCILMPHNY

SEQ ID NO: 1622 - protein, 19 aa, Artificial
  CDR sequence
KGTVYSGSRPISDEYDYDY

SEQ ID NO: 1623 - protein, 8 aa, Artificial
  CDR sequence
RILGGGRY

SEQ ID NO: 1624 - protein, 15 aa, Artificial
  CDR sequence
HSFSALIPPVSFWPS

SEQ ID NO: 1625 - protein, 13 aa, Artificial
  CDR sequence
DVQTNSRGAQQIF

SEQ ID NO: 1626 - protein, 13 aa, Artificial
  CDR sequence
DVQTNSRDAQQIF

SEQ ID NO: 1627 - protein, 19 aa, Artificial
  CDR sequence
DPMLYCDTDYEPQTTDFTS

SEQ ID NO: 1628 - protein, 17 aa, Artificial
  CDR sequence
DVRPYGLGPRSDERVAD

SEQ ID NO: 1629 - protein, 5 aa, Artificial
  CDR sequence
PRYGY

SEQ ID NO: 1630 - protein, 12 aa, Artificial
  CDR sequence
KGRDDSYQPWNY

SEQ ID NO: 1631 - protein, 10 aa, Artificial
  CDR sequence
GSDASGGYDY

SEQ ID NO: 1632 - protein, 10 aa, Artificial
  CDR sequence
GSDASGGYDY

SEQ ID NO: 1633 - protein, 16 aa, Artificial
  CDR sequence
DLYYTAYVAAADEYDY

SEQ ID NO: 1634 - protein, 19 aa, Artificial
  CDR sequence
KGTVYSGSSPISDEYGYDY

SEQ ID NO: 1635 - protein, 15 aa, Artificial
  CDR sequence
KRDSSTYYRVRNYDY

SEQ ID NO: 1636 - protein, 18 aa, Artificial
  CDR sequence
ARTVYVGHLYYIDNEYAY

SEQ ID NO: 1637 - protein, 12 aa, Artificial
  CDR sequence
  misc_feature (10)..(10): Xaa can be any naturally occurring amino acid
KGRDDSYQPXNY

SEQ ID NO: 1638 - protein, 11 aa, Artificial
  framework sequence
WGQGTQVTVSS

SEQ ID NO: 1639 - protein, 11 aa, Artificial
  framework sequence
WGQGTQVTVSS

SEQ ID NO: 1640 - protein, 11 aa, Artificial
  framework sequence
WGQGTQVTVSS

SEQ ID NO: 1641 - protein, 11 aa, Artificial
  framework sequence
WGQGTQVTVSS

SEQ ID NO: 1642 - protein, 11 aa, Artificial
  framework sequence
WGQGTQVTVSS

SEQ ID NO: 1643 - protein, 11 aa, Artificial
  framework sequence
WGQGTQVTVSS

SEQ ID NO: 1644 - protein, 11 aa, Artificial
  framework sequence
WGQGTQVTVSS

SEQ ID NO: 1645 - protein, 11 aa, Artificial
  framework sequence
WGQGTQVTVSS

SEQ ID NO: 1646 - protein, 11 aa, Artificial
  framework sequence
WGQGTQVTVSS

SEQ ID NO: 1647 - protein, 11 aa, Artificial
  framework sequence
WGQGTQVTVSS

SEQ ID NO: 1648 - protein, 11 aa, Artificial
  framework sequence
WGQGTQVTVSS

SEQ ID NO: 1649 - protein, 11 aa, Artificial
  framework sequence
WGQGTQVTVSS

SEQ ID NO: 1650 - protein, 11 aa, Artificial
  framework sequence
WGQGTQVTVSS

SEQ ID NO: 1651 - protein, 11 aa, Artificial
  framework sequence
WGQGTQVTVSS

SEQ ID NO: 1652 - protein, 11 aa, Artificial
  framework sequence
WGQGTQVTVSS

SEQ ID NO: 1653 - protein, 11 aa, Artificial
  framework sequence
WGQGTQVTVSS

SEQ ID NO: 1654 - protein, 11 aa, Artificial
  framework sequence
WGQGTQVTVSS

SEQ ID NO: 1655 - protein, 11 aa, Artificial
  framework sequence
WGQGTQVTVSS

SEQ ID NO: 1656 - protein, 11 aa, Artificial
  framework sequence
WGQGTQVTVSS

SEQ ID NO: 1657 - protein, 11 aa, Artificial
  framework sequence
WGQGTQVTVSS

SEQ ID NO: 1658 - protein, 11 aa, Artificial
  framework sequence
WGQGTQVTVSS

SEQ ID NO: 1659 - protein, 11 aa, Artificial
  framework sequence
WGQGTQVTVSS

SEQ ID NO: 1660 - protein, 11 aa, Artificial
  framework sequence
WGQGTQVTVSS

SEQ ID NO: 1661 - protein, 11 aa, Artificial
  framework sequence
WGQGTQVTVSS

SEQ ID NO: 1662 - protein, 11 aa, Artificial
  framework sequence
WGQGTQVTVSS

SEQ ID NO: 1663 - protein, 11 aa, Artificial
  framework sequence
WGQGTQVTVSS

SEQ ID NO: 1664 - protein, 11 aa, Artificial
  framework sequence
WGQGTQVTVSS

SEQ ID NO: 1665 - protein, 11 aa, Artificial
  framework sequence
WGQGTQVTVSS

SEQ ID NO: 1666 - protein, 11 aa, Artificial
  framework sequence
WGQGTQVTVSS

SEQ ID NO: 1667 - protein, 11 aa, Artificial
  framework sequence
WGQGTQVTVSS

SEQ ID NO: 1668 - protein, 11 aa, Artificial
  framework sequence
WGQGTQVTVSS

SEQ ID NO: 1669 - protein, 11 aa, Artificial
  framework sequence
WGQGTQVTVSS

SEQ ID NO: 1670 - protein, 11 aa, Artificial
  framework sequence
WGQGTQVTVSS

SEQ ID NO: 1671 - protein, 11 aa, Artificial
  framework sequence
WGQGTQVTVSS

SEQ ID NO: 1672 - protein, 11 aa, Artificial
  framework sequence
WGQGTQVTVSS

SEQ ID NO: 1673 - protein, 11 aa, Artificial
  framework sequence
WGQGTQVTVSS

SEQ ID NO: 1674 - protein, 11 aa, Artificial
  framework sequence
WGQGTQVTVSS

SEQ ID NO: 1675 - protein, 11 aa, Artificial
  framework sequence
WGQGTQVTVSS

SEQ ID NO: 1676 - protein, 11 aa, Artificial
  framework sequence
WGQGTQVTVSS

SEQ ID NO: 1677 - protein, 11 aa, Artificial
  framework sequence
WGTGTQVTVSS

SEQ ID NO: 1678 - protein, 11 aa, Artificial
  framework sequence
WGTGTQVTVSS

SEQ ID NO: 1679 - protein, 11 aa, Artificial
  framework sequence
WGKGTLVTVSS

SEQ ID NO: 1680 - protein, 11 aa, Artificial
  framework sequence
WGKGTLVTVSS

SEQ ID NO: 1681 - protein, 11 aa, Artificial
  framework sequence
WGKGTLVTVSS

SEQ ID NO: 1682 - protein, 11 aa, Artificial
  framework sequence
WGKGTLVTVSS

SEQ ID NO: 1683 - protein, 11 aa, Artificial
  framework sequence
WGKGTLVTVSS

SEQ ID NO: 1684 - protein, 11 aa, Artificial
  framework sequence
WGQGTQVTVSS

SEQ ID NO: 1685 - protein, 11 aa, Artificial
  framework sequence
WGQGTQVTVSS

SEQ ID NO: 1686 - protein, 11 aa, Artificial
  framework sequence
RGQGTQVTVSS

SEQ ID NO: 1687 - protein, 11 aa, Artificial
  framework sequence
RGKGTLVTVSS

SEQ ID NO: 1688 - protein, 11 aa, Artificial
  framework sequence
WGQGTQVTVSS

SEQ ID NO: 1689 - protein, 11 aa, Artificial
  framework sequence
WGQGTQVTVSS

SEQ ID NO: 1690 - protein, 11 aa, Artificial
  framework sequence
WGQGTQVTVSS

SEQ ID NO: 1691 - protein, 11 aa, Artificial
  framework sequence
RGQGTQVTVSS

SEQ ID NO: 1692 - protein, 11 aa, Artificial
  framework sequence
WGQGTQVTVSS

SEQ ID NO: 1693 - protein, 11 aa, Artificial
  framework sequence
RGQGTHVTVSS

SEQ ID NO: 1694 - protein, 11 aa, Artificial
  framework sequence
WGQGTQVTVSS

SEQ ID NO: 1695 - protein, 11 aa, Artificial
  framework sequence
WGQGTQVTVSS

SEQ ID NO: 1696 - protein, 11 aa, Artificial
  framework sequence
RGQGTQVTVSS

SEQ ID NO: 1697 - protein, 11 aa, Artificial
  framework sequence
RGQGTQVTVSS

SEQ ID NO: 1698 - protein, 11 aa, Artificial
  framework sequence
RGQGTQVTVSS

SEQ ID NO: 1699 - protein, 11 aa, Artificial
  framework sequence
RGQGTQVTVSS

SEQ ID NO: 1700 - protein, 11 aa, Artificial
  framework sequence
WGQGTQVTVSS

SEQ ID NO: 1701 - protein, 11 aa, Artificial
  framework sequence
WGQGTQVTVSS

SEQ ID NO: 1702 - protein, 11 aa, Artificial
  framework sequence
WGKGTLVTVSS

SEQ ID NO: 1703 - protein, 11 aa, Artificial
  framework sequence
WGQGTQVTVSS

SEQ ID NO: 1704 - protein, 11 aa, Artificial
  framework sequence
WGQGTQVTVSS

SEQ ID NO: 1705 - protein, 11 aa, Artificial
  framework sequence
WGQGTQVTVSS

SEQ ID NO: 1706 - protein, 11 aa, Artificial
  framework sequence
WGQGTQVTVSS

SEQ ID NO: 1707 - protein, 11 aa, Artificial
  framework sequence
RGQGTQVTVSS

SEQ ID NO: 1708 - protein, 11 aa, Artificial
  framework sequence
WGQGTQVTVSS

SEQ ID NO: 1709 - protein, 11 aa, Artificial
  framework sequence
WGQGTQVTVSS

SEQ ID NO: 1710 - protein, 11 aa, Artificial
  framework sequence
WGQGTQVTVSS

SEQ ID NO: 1711 - protein, 11 aa, Artificial
  framework sequence
WGQGTQVTVSS

SEQ ID NO: 1712 - protein, 11 aa, Artificial
  framework sequence
WGQGTQVTVSS

SEQ ID NO: 1713 - protein, 11 aa, Artificial
  framework sequence
WGQGTQVTVSS

SEQ ID NO: 1714 - protein, 11 aa, Artificial
  framework sequence
WGQGTQVTVSS

SEQ ID NO: 1715 - protein, 11 aa, Artificial
  framework sequence
KGQGTQVTVSS

SEQ ID NO: 1716 - protein, 11 aa, Artificial
  framework sequence
WGQGTQVTVSS

SEQ ID NO: 1717 - protein, 11 aa, Artificial
  framework sequence
WGQGTQVTVSS

SEQ ID NO: 1718 - protein, 11 aa, Artificial
  framework sequence
WGQGTQVTVSS

SEQ ID NO: 1719 - protein, 11 aa, Artificial
  framework sequence
WGQGTQVTVSS

SEQ ID NO: 1720 - protein, 11 aa, Artificial
  framework sequence
WGQGTQVTVSS

SEQ ID NO: 1721 - protein, 11 aa, Artificial
  framework sequence
WGQGTQVTVSS

SEQ ID NO: 1722 - protein, 11 aa, Artificial
  framework sequence
WGQGTQVTVSS

SEQ ID NO: 1723 - protein, 11 aa, Artificial
  framework sequence
WGQGTLVTVSS

SEQ ID NO: 1724 - protein, 11 aa, Artificial
  framework sequence
WGQGTQVTVSS

SEQ ID NO: 1725 - protein, 11 aa, Artificial
  framework sequence
WGQGTQVTVSS

SEQ ID NO: 1726 - protein, 11 aa, Artificial
  framework sequence
WGQGTQVTVSS

SEQ ID NO: 1727 - protein, 11 aa, Artificial
  framework sequence
WGQGTQVTVSS

SEQ ID NO: 1728 - protein, 11 aa, Artificial
  framework sequence
WGQGTQVTVSS

SEQ ID NO: 1729 - protein, 11 aa, Artificial
  framework sequence
WGQGTQVTVSS

SEQ ID NO: 1730 - protein, 11 aa, Artificial
  framework sequence
RGKGTLVTVSS

SEQ ID NO: 1731 - protein, 11 aa, Artificial
  framework sequence
WGQGTQVTVSS

SEQ ID NO: 1732 - protein, 11 aa, Artificial
  framework sequence
RGQGTQVTVSS

SEQ ID NO: 1733 - protein, 11 aa, Artificial
  framework sequence
WGQGTQVTVSS

SEQ ID NO: 1734 - protein, 11 aa, Artificial
  framework sequence
WGQGTQVTVSS

SEQ ID NO: 1735 - protein, 11 aa, Artificial
  framework sequence
WGQGTQVTVSS

SEQ ID NO: 1736 - protein, 11 aa, Artificial
  framework sequence
RGQGTQVTVSS

SEQ ID NO: 1737 - protein, 11 aa, Artificial
  framework sequence
WGQGTQVTVSS

SEQ ID NO: 1738 - protein, 11 aa, Artificial
  framework sequence
WGQGTQVTVSS

SEQ ID NO: 1739 - protein, 11 aa, Artificial
  framework sequence
RGQGTQVTVSS

SEQ ID NO: 1740 - protein, 11 aa, Artificial
  framework sequence
WAQGTQVTVSS

SEQ ID NO: 1741 - protein, 11 aa, Artificial
  framework sequence
WGQGTQVTVSS

SEQ ID NO: 1742 - protein, 11 aa, Artificial
  framework sequence
WGQGTQVTVSS

SEQ ID NO: 1743 - protein, 11 aa, Artificial
  framework sequence
WGQGTQVTVSS

SEQ ID NO: 1744 - protein, 11 aa, Artificial
  framework sequence
WGQGTQVTVSS

SEQ ID NO: 1745 - protein, 11 aa, Artificial
  framework sequence
WGQGTQVTVSS

SEQ ID NO: 1746 - protein, 11 aa, Artificial
  framework sequence
RGQGTQVTVSS

SEQ ID NO: 1747 - protein, 11 aa, Artificial
  framework sequence
WGQGTQVTVSS

SEQ ID NO: 1748 - protein, 11 aa, Artificial
  framework sequence
RGQGTQVTVSS

SEQ ID NO: 1749 - protein, 11 aa, Artificial
  framework sequence
WGQGTQVTVSS

SEQ ID NO: 1750 - protein, 11 aa, Artificial
  framework sequence
WGQGTQVTVSS

SEQ ID NO: 1751 - protein, 11 aa, Artificial
  framework sequence
RGQGTQVTVSS

SEQ ID NO: 1752 - protein, 11 aa, Artificial
  framework sequence
WGQGTQVTVSS

SEQ ID NO: 1753 - protein, 11 aa, Artificial
  framework sequence
RGQGTQVTVSS

SEQ ID NO: 1754 - protein, 11 aa, Artificial
  framework sequence
WGQGTQVTVSS

SEQ ID NO: 1755 - protein, 11 aa, Artificial
  framework sequence
  misc_feature (10)..(10): Unknown amino acid, most likely one of the Camelid amino acid residues mentioned for this specific position in Tables A-5 to A-8.
WGQGTQVTVXS

SEQ ID NO: 1756 - protein, 11 aa, Artificial
  framework sequence
WGQGTQVTVSS

SEQ ID NO: 1757 - protein, 11 aa, Artificial
  framework sequence
WGQGTQVTVSS

SEQ ID NO: 1758 - protein, 11 aa, Artificial
  framework sequence
WGQGTQVTVSS

SEQ ID NO: 1759 - protein, 11 aa, Artificial
  framework sequence
WGQGTQVTVSS

SEQ ID NO: 1760 - protein, 11 aa, Artificial
  framework sequence
WGQGTQVTVSS

SEQ ID NO: 1761 - protein, 11 aa, Artificial
  framework sequence
WGQGTQVTVSS

SEQ ID NO: 1762 - protein, 11 aa, Artificial
  framework sequence
WGQGTQVTVSS

SEQ ID NO: 1763 - protein, 11 aa, Artificial
  framework sequence
WGQGTQVTVSS

SEQ ID NO: 1764 - protein, 11 aa, Artificial
  framework sequence
WGQGTQVTVSS

SEQ ID NO: 1765 - protein, 11 aa, Artificial
  framework sequence
WGQGTQVTVSS

SEQ ID NO: 1766 - protein, 11 aa, Artificial
  framework sequence
WGQGTQVTVSS

SEQ ID NO: 1767 - protein, 11 aa, Artificial
  framework sequence
WGQGTQVTVSS

SEQ ID NO: 1768 - protein, 11 aa, Artificial
  framework sequence
WGQGTQVTVSS

SEQ ID NO: 1769 - protein, 11 aa, Artificial
  framework sequence
  misc_feature (5)..(5): Unknown amino acid, most likely one of the Camelid amino acid residues mentioned for this specific position in Tables A-5 to A-8.
WGQGXQVTVSS

SEQ ID NO: 1770 - protein, 11 aa, Artificial
  framework sequence
WGQGTQVTVSS

SEQ ID NO: 1771 - protein, 11 aa, Artificial
  framework sequence
WGQGTQVTVSS

SEQ ID NO: 1772 - protein, 11 aa, Artificial
  framework sequence
RGQGTQVTVSS

SEQ ID NO: 1773 - protein, 11 aa, Artificial
  framework sequence
WGQGTQVTVSS

SEQ ID NO: 1774 - protein, 11 aa, Artificial
  framework sequence
WGQGTQVTVSS

SEQ ID NO: 1775 - protein, 11 aa, Artificial
  framework sequence
WGQGTQVTVSS

SEQ ID NO: 1776 - protein, 11 aa, Artificial
  framework sequence
WGQGTQVTVSS

SEQ ID NO: 1777 - protein, 11 aa, Artificial
  framework sequence
WGQGTQVTVSS

SEQ ID NO: 1778 - protein, 11 aa, Artificial
  framework sequence
WGQGTQVTVSS

SEQ ID NO: 1779 - protein, 11 aa, Artificial
  framework sequence
WGQGTQVTVSS

SEQ ID NO: 1780 - protein, 11 aa, Artificial
  framework sequence
WGQGTQVTVSS

SEQ ID NO: 1781 - protein, 11 aa, Artificial
  framework sequence
WGQGTLVTVSS

SEQ ID NO: 1782 - protein, 11 aa, Artificial
  framework sequence
WGKGTLVTVSS

SEQ ID NO: 1783 - protein, 11 aa, Artificial
  framework sequence
WGRGTQVTVSS

SEQ ID NO: 1784 - protein, 11 aa, Artificial
  framework sequence
RGQGTQVTVSS

SEQ ID NO: 1785 - protein, 11 aa, Artificial
  framework sequence
WGQGTQVTVSS

SEQ ID NO: 1786 - protein, 11 aa, Artificial
  framework sequence
WGQGTQVTVSS

SEQ ID NO: 1787 - protein, 11 aa, Artificial
  framework sequence
WGRGTQVTVSS

SEQ ID NO: 1788 - protein, 11 aa, Artificial
  framework sequence
WGQGTQVTVSS

SEQ ID NO: 1789 - protein, 11 aa, Artificial
  framework sequence
WGQGTQVTVSS

SEQ ID NO: 1790 - protein, 11 aa, Artificial
  framework sequence
WGQGTQVTVSS

SEQ ID NO: 1791 - protein, 11 aa, Artificial
  framework sequence
WGQGTQVTVSS

SEQ ID NO: 1792 - protein, 11 aa, Artificial
  framework sequence
WGQGTQVTVSS

SEQ ID NO: 1793 - protein, 11 aa, Artificial
  framework sequence
WGQGTQVTVSS

SEQ ID NO: 1794 - protein, 11 aa, Artificial
  framework sequence
WGRGTQVTVSS

SEQ ID NO: 1795 - protein, 11 aa, Artificial
  framework sequence
WGQGTQVTVSS

SEQ ID NO: 1796 - protein, 11 aa, Artificial
  framework sequence
WGQGTQVTVSS

SEQ ID NO: 1797 - protein, 11 aa, Artificial
  framework sequence
RGQGTQVTVSS

SEQ ID NO: 1798 - protein, 11 aa, Artificial
  framework sequence
WGRGTQVTVSS

SEQ ID NO: 1799 - protein, 11 aa, Artificial
  framework sequence
WGQGTQVTVSS

SEQ ID NO: 1800 - protein, 11 aa, Artificial
  framework sequence
WGQGTQVTVSS

SEQ ID NO: 1801 - protein, 11 aa, Artificial
  framework sequence
WGQGAQVTVSS

SEQ ID NO: 1802 - protein, 11 aa, Artificial
  framework sequence
WGRGTQVTVSS

SEQ ID NO: 1803 - protein, 11 aa, Artificial
  framework sequence
WGQGTQVTVSS

SEQ ID NO: 1804 - protein, 11 aa, Artificial
  framework sequence
WGQGTQVTVSS

SEQ ID NO: 1805 - protein, 11 aa, Artificial
  framework sequence
WGQGTQVTVSS

SEQ ID NO: 1806 - protein, 11 aa, Artificial
  framework sequence
WGQGTQVTVSS

SEQ ID NO: 1807 - protein, 11 aa, Artificial
  framework sequence
WGQGTQVTVSS

SEQ ID NO: 1808 - protein, 11 aa, Artificial
  framework sequence
WGQGTQVTVSS

SEQ ID NO: 1809 - protein, 11 aa, Artificial
  framework sequence
WGQGTQVTVSS

SEQ ID NO: 1810 - protein, 11 aa, Artificial
  framework sequence
WGRGTQVTVSS

SEQ ID NO: 1811 - protein, 11 aa, Artificial
  framework sequence
WGRGTQVTVSS

SEQ ID NO: 1812 - protein, 11 aa, Artificial
  framework sequence
WGQGTQVTVSS

SEQ ID NO: 1813 - protein, 11 aa, Artificial
  framework sequence
WGQGTQVTVSS

SEQ ID NO: 1814 - protein, 11 aa, Artificial
  framework sequence
WGQGTQVTVSS

SEQ ID NO: 1815 - protein, 11 aa, Artificial
  framework sequence
WGPGTQVTVSS

SEQ ID NO: 1816 - protein, 11 aa, Artificial
  framework sequence
WGQGTQVTVSS

SEQ ID NO: 1817 - protein, 11 aa, Artificial
  framework sequence
WGQGTQVTVSS

SEQ ID NO: 1818 - protein, 11 aa, Artificial
  framework sequence
WGQGTQVTVSS

SEQ ID NO: 1819 - protein, 11 aa, Artificial
  framework sequence
RGQGTQVTVSS

SEQ ID NO: 1820 - protein, 11 aa, Artificial
  framework sequence
WTQGTQVTVSS

SEQ ID NO: 1821 - protein, 11 aa, Artificial
  framework sequence
RGQGTQVTVSS

SEQ ID NO: 1822 - protein, 11 aa, Artificial
  framework sequence
WGQGTQVTVSS

SEQ ID NO: 1823 - protein, 11 aa, Artificial
  framework sequence
  misc_feature (6)..(6): Unknown amino acid, most likely one of the Camelid amino acid residues mentioned for this specific position in Tables A-5 to A-8.
WGQGTXVTVSS

SEQ ID NO: 1824 - protein, 11 aa, Artificial
  framework sequence
WGQGTQVTVSS

SEQ ID NO: 1825 - protein, 11 aa, Artificial
  framework sequence
WGQGTQVTVSS

SEQ ID NO: 1826 - protein, 11 aa, Artificial
  framework sequence
WGQGTQVTVSS

SEQ ID NO: 1827 - protein, 11 aa, Artificial
  framework sequence
WGQGTQVTVSS

SEQ ID NO: 1828 - protein, 11 aa, Artificial
  framework sequence
WGQGTQVTVSS

SEQ ID NO: 1829 - protein, 11 aa, Artificial
  framework sequence
WGQGTQVTVSS

SEQ ID NO: 1830 - protein, 11 aa, Artificial
  framework sequence
WGQGTQVTVSS

SEQ ID NO: 1831 - protein, 11 aa, Artificial
  framework sequence
WGQGTQVTVSS

SEQ ID NO: 1832 - protein, 11 aa, Artificial
  framework sequence
LGQGTQVTVSS

SEQ ID NO: 1833 - protein, 11 aa, Artificial
  framework sequence
WGQGTQVTVSS

SEQ ID NO: 1834 - protein, 11 aa, Artificial
  framework sequence
WGQGTQVTVSS

SEQ ID NO: 1835 - protein, 11 aa, Artificial
  framework sequence
WGRGTQVTVSS

SEQ ID NO: 1836 - protein, 11 aa, Artificial
  framework sequence
WGQGTQVTVSS

SEQ ID NO: 1837 - protein, 11 aa, Artificial
  framework sequence
WGQGTQVTVSS

SEQ ID NO: 1838 - protein, 11 aa, Artificial
  framework sequence
WGQGTQVTVSS

SEQ ID NO: 1839 - protein, 11 aa, Artificial
  framework sequence
WGQGTQVTVSS

SEQ ID NO: 1840 - protein, 11 aa, Artificial
  framework sequence
WGKGTLVTVSS

SEQ ID NO: 1841 - protein, 11 aa, Artificial
  framework sequence
LGQGTLVTVSS

SEQ ID NO: 1842 - protein, 11 aa, Artificial
  framework sequence
WGQGTQVTVSS

SEQ ID NO: 1843 - protein, 11 aa, Artificial
  framework sequence
WGQGTQVTVSS

SEQ ID NO: 1844 - protein, 11 aa, Artificial
  framework sequence
LGQGTQVTVSS

SEQ ID NO: 1845 - protein, 11 aa, Artificial
  framework sequence
WGQGTQVTVSS

SEQ ID NO: 1846 - protein, 11 aa, Artificial
  framework sequence
WGQGTQVTVSS

SEQ ID NO: 1847 - protein, 11 aa, Artificial
  framework sequence
WGQGTQVTVSS

SEQ ID NO: 1848 - protein, 11 aa, Artificial
  framework sequence
WGQGTQVTVSS

SEQ ID NO: 1849 - protein, 11 aa, Artificial
  framework sequence
WGQGTQVTVSS

SEQ ID NO: 1850 - protein, 11 aa, Artificial
  framework sequence
WGQGTQVTVSS

SEQ ID NO: 1851 - protein, 11 aa, Artificial
  framework sequence
WGQGTQVTVSS

SEQ ID NO: 1852 - protein, 11 aa, Artificial
  framework sequence
WGQGTQVTVSS

SEQ ID NO: 1853 - protein, 11 aa, Artificial
  framework sequence
WGQGTQVTVSS

SEQ ID NO: 1854 - protein, 11 aa, Artificial
  framework sequence
WGQGTQVTVSS

SEQ ID NO: 1855 - protein, 11 aa, Artificial
  framework sequence
WGQGTQVTVSS

SEQ ID NO: 1856 - protein, 11 aa, Artificial
  framework sequence
WGQGTQVTVSS

SEQ ID NO: 1857 - protein, 11 aa, Artificial
  framework sequence
WGQGTQVTVSS

SEQ ID NO: 1858 - protein, 11 aa, Artificial
  framework sequence
WGQGTQVTVSS

SEQ ID NO: 1859 - protein, 11 aa, Artificial
  framework sequence
WGQGTQVTVSS

SEQ ID NO: 1860 - protein, 11 aa, Artificial
  framework sequence
WGQGTQVTVSS

SEQ ID NO: 1861 - protein, 11 aa, Artificial
  framework sequence
RGQGTQVTVSS

SEQ ID NO: 1862 - protein, 11 aa, Artificial
  framework sequence
WGQGTQVTVSS

SEQ ID NO: 1863 - protein, 11 aa, Artificial
  framework sequence
WGRGTQVTVSS

SEQ ID NO: 1864 - protein, 11 aa, Artificial
  framework sequence
WGQGTQVTVSS

SEQ ID NO: 1865 - protein, 11 aa, Artificial
  framework sequence
WGQGTQVTVSS

SEQ ID NO: 1866 - protein, 11 aa, Artificial
  framework sequence
WGQGTQVTVSS

SEQ ID NO: 1867 - protein, 11 aa, Artificial
  framework sequence
WGQGTQVTVSS

SEQ ID NO: 1868 - protein, 11 aa, Artificial
  framework sequence
WGQGTQVTVSS

SEQ ID NO: 1869 - protein, 11 aa, Artificial
  framework sequence
  misc_feature (9)..(9): Xaa can be any naturally occurring amino acid
  misc_feature (11)..(11): Unknown amino acid, most likely one of the Camelid amino acid residues mentioned for this specific position in Tables A-5 to A-8.
WGQGTQVTXSX

SEQ ID NO: 1870 - protein, 11 aa, Artificial
  framework sequence
WGQGTQVTVSS

SEQ ID NO: 1871 - protein, 11 aa, Artificial
  framework sequence
WGQGTQVTVSS

SEQ ID NO: 1872 - protein, 11 aa, Artificial
  framework sequence
WGQGTQVTVSS

SEQ ID NO: 1873 - protein, 11 aa, Artificial
  framework sequence
WGQGTQVTVSS

SEQ ID NO: 1874 - protein, 11 aa, Artificial
  framework sequence
WGQGTQVTVSS

SEQ ID NO: 1875 - protein, 11 aa, Artificial
  framework sequence
WGQGTQVTVSS

SEQ ID NO: 1876 - protein, 11 aa, Artificial
  framework sequence
WGQGTQVTVSS

SEQ ID NO: 1877 - protein, 11 aa, Artificial
  framework sequence
RGQGTQVTVSS

SEQ ID NO: 1878 - protein, 11 aa, Artificial
  framework sequence
RGQGTRVTVSS

SEQ ID NO: 1879 - protein, 11 aa, Artificial
  framework sequence
WGRGTQVTVSS

SEQ ID NO: 1880 - protein, 11 aa, Artificial
  framework sequence
WGQGTQVTVSS

SEQ ID NO: 1881 - protein, 11 aa, Artificial
  framework sequence
WGQGTQVTVSS

SEQ ID NO: 1882 - protein, 11 aa, Artificial
  framework sequence
WGQGTQVTVSS

SEQ ID NO: 1883 - protein, 11 aa, Artificial
  framework sequence
WGQGTQVTVSS

SEQ ID NO: 1884 - protein, 11 aa, Artificial
  framework sequence
WGQGTQVTVSS

SEQ ID NO: 1885 - protein, 11 aa, Artificial
  framework sequence
WGQGTQVTVSS

SEQ ID NO: 1886 - protein, 11 aa, Artificial
  framework sequence
WGQGTQVTVSS

SEQ ID NO: 1887 - protein, 11 aa, Artificial
  framework sequence
WGQGTQVTVSS

SEQ ID NO: 1888 - protein, 11 aa, Artificial
  framework sequence
WGQGTQVTVSS

SEQ ID NO: 1889 - protein, 11 aa, Artificial
  framework sequence
WGQGTQVTVSS

SEQ ID NO: 1890 - protein, 130 aa, Artificial
  Nanobody sequence
EVQLVESGGGLVQAGGSLRLSCAASGSIFNFNYMGWFRQAPGKEREFVAAIRWSGSSTYYADSVKGRFTISRDDAKNTVALQMNSLKPEDTAIYYCALRKGIPYSTSDRVIKGVNDYDYWGQGTQVTVSS

SEQ ID NO: 1891 - protein, 130 aa, Artificial
  Nanobody sequence
RGAAGGVWGGLVQAGGSLRLSCAASGSIFNFNYMGWFRQAPGKEREFVAAIRWSGSSTYYADSVKGRFTISRDDAKNTVALQMNSLKPEDTAIYYCALRKGIPYSTSDRVIKGVNDYDYWGQGTQVTVSS

SEQ ID NO: 1892 - protein, 130 aa, Artificial
  Nanobody sequence
EVQLVESGGGLVQAGGSLRLSCAASGSIFNFNYMGWFRQAPGKEREFVSAIRWSGISTYYADSVKGRFTISRDDAKNTVYLQMNSLKPEDTAIYYCALRKGIPYSTSDRYIKGVNDYDYWGQGTQVTVSS

SEQ ID NO: 1893 - protein, 130 aa, Artificial
  Nanobody sequence
EVQLVESGGGLVQAGGSLRLSCAASGSIFNFNYMGWFRQAPGKEREFVAAIRWSGRSTYYADSVKGRFTISRDDAKNTVALQMNSLKPEDTAIYYCALRKGIPYSTSDRVIKGVNDYEYWGQGTQVTVSS

SEQ ID NO: 1894 - protein, 130 aa, Artificial
  Nanobody sequence
EVQLVESGGGLVQAGGSLRLSCAASGSIFNFNYMGWFRQAPGKEREFVAAIRWSGSSTYYADSVKGRFTISRDDAKNTVYLQMNSLKPEDTATYYCALRKGIPYSISDRVIKGVNDYDYWGQGTQVTVSS

SEQ ID NO: 1895 - protein, 130 aa, Artificial
  Nanobody sequence
EVQLVESGGGLVQAGGSLRVSCAASGSIFAFNYMGWFRQAPGKEREFVAAIRWSGSSTYYADSVKGRFSISRDDAKNTVYLQMNSLKPEDTAIYYCALRKGTPYSTSYRVIKAVNDYEYWGQGTQVTVSS

SEQ ID NO: 1896 - protein, 130 aa, Artificial
  Nanobody sequence
EVQLVESGGGLVQAGGSLRLSCAASGSIFNFNYMGWFRQAPGKEREFVATIRWSGSSTDYADSVKGRFTISRDDAKNTVYLQMNSLKPEDAAIYYCALRKGIPYSTSNRYIKGVNDYDYWGQGTQVTVSS

SEQ ID NO: 1897 - protein, 130 aa, Artificial
  Nanobody sequence
EVQLVESGGGLVQAGGSLRLSCAASGSIFNFNYMGWFRQAPGKEREFVATIRWSGSSTYYADSVKGRFTISRDGAKNTVYLQMNSLKPEDTAIYYCALRKGIPYSTSSLYIKGVNDYDYWGQGTQVTVSS

SEQ ID NO: 1898 - protein, 125 aa, Artificial
  Nanobody sequence
EVQLVESGGGLVQAGGSLRLSCAASGRIFSLPASGNIFNLLTIAWHRQAPGMQRELVATINSGSRTNYADSVKGRFTISRDNAQKTVYLQMNNLKPEDTAVYYCQTSGSGSPNFWGQGTQVTVSS

SEQ ID NO: 1899 - protein, 125 aa, Artificial
  Nanobody sequence
EVQLVESGGGLVQAGGSLRLSCAASGSIFSLPASGNIFNLLTIAWHRQTPGKQRELVATINSGGRTNYTDSVKGRFTISRDNAQKTVYLQMNNLKPEDTAVYYCQTSGSGSPNYWGQGTQVTVSS

SEQ ID NO: 1900 - protein, 120 aa, Artificial
  Nanobody sequence
EVQLVESGGGLVQPGGSLRLSCAGSGSILRIASMGWYRQAPGKQRELAAVIGSEGDTDYADSMKGRFTISLDNAANTVYLQMNSLKPEDTAVYICSGLLLNGGGTWQRLWGQGTQVTVSS

SEQ ID NO: 1901 - protein, 130 aa, Artificial
  Nanobody sequence
EVQLVESGGGLVQAGGSLTLSCAASVRTFSTSAMGWFRQAPGKEREFVAAINWNAGSTYHADSVKGRFTISGDNAKNSVFLQMNGLKPEDTAVYYCAAQASGRVTYFDYAYRRGSNYDYWGQGTQVTVSS

SEQ ID NO: 1902 - protein, 129 aa, Artificial
  Nanobody sequence
EVQLVESGGGLVQAGGSLTLSCAVSGLTFNNYAMGWFRQVPGKEREFVAAISRSGLRTFYSDSVKGRFTISRDSAKSTVYVQMNNLKPEDTAVYFCAADRRTYYSEGPSLTDTLRYDYWGQGTQVTVSS

SEQ ID NO: 1903 - protein, 128 aa, Artificial
  Nanobody sequence
EVQLVESGGGLVQAGGSLRLSCAASGRTSSSYSMGWFRQAPGKEREFVAYISGGGLTIYYAHSVKGRFTISRDNAKNTVYLQMNSLNSADTAVYSCAAPKRDLYLGSRYPVPESYDYWGQGTQVTVSS

SEQ ID NO: 1904 - protein, 126 aa, Artificial
  Nanobody sequence
EVQLVESGGGLVQAGDSLKLSCAASGRTSSSYAMGWFRQAPGKEREFVAAIIWSRGNTYYADSVKGRFTISRDNAKNTMYLQMNNLKPEDTAVYYCAAHRGDSIYYYTVWGKYDAWGQGTQVTVSS

SEQ ID NO: 1905 - protein, 125 aa, Artificial
  Nanobody sequence
EVQLVESGGGLVQAGASLRLSCAASGRSFDSNVMGWFRQYPGKLREFVAAIWWSAGTTKYADSVKGRFTISRDNAKNTVHLQMNSLELEDTALYYCAADRVSSSIQTMAGTYDYWGQGTQVTVSS

SEQ ID NO: 1906 - protein, 124 aa, Artificial
  Nanobody sequence
EVQLVESGGGLVQPGGSLRLSCAASGFTFSNYWMYWVRQAPGKGLERVAPLNPGGTITLYADFVKSRFTISRDNAKNTVYLQMNSLKPEDTAVYVCAAPSGTLYTRNKSGYIYWGQGTQVTVSS

SEQ ID NO: 1907 - protein, 118 aa, Artificial
  Nanobody sequence
EVQLVESGGGLVQAGGSLRLSCAASGSISEFNVIGWHRQAPGKERELVASITGHDSTYYTGSVKGRFTISRDNAKTTVYLQMNSLKPEDTAVYYCAVRQILRREYDYWGQGTQVTVSS

SEQ ID NO: 1908 - protein, 126 aa, Artificial
  Nanobody sequence
EVQLVESGGGLVQAGGSLRLSCAASGRTFSTYAAGWFRQDPGEEREFVSTISRGGGTTGYADAVKGRFTISRDNAKNTVYLQMNNLKPEDTAVYYCAAADVSYGTTTDDPKRYDYWGQGTQVTVSS

SEQ ID NO: 1909 - protein, 126 aa, Artificial
  Nanobody sequence
EVQLVESGGGLVQAGGSLRLSCSASGRTFSTYAAGWFRQAPGKDREFVSTISRGGGGTYSADAVTGRFTISRDNAKNTVYLQMNNLKPEDTAVYYCAAADVSYGTTTDDPKRYDYWGQGTQVTVSS

SEQ ID NO: 1910 - protein, 126 aa, Artificial
  Nanobody sequence
EVQLVESGGGLVQAGGSLELSCSASGGTLRTYAMGWFRQAPGKEREFVSTISRGGGSTDYADAVKGRFTISRDNAKNTVYLQMNSLKPEDTAEYICTAADVSYGVTTDDPKRYDYWGQGTQVTVSS

SEQ ID NO: 1911 - protein, 125 aa, Artificial
  Nanobody sequence
EVQLVESGGGLVQAGGSLRLSCAASGTISSINTMAWFRQAPGKEREFVAALVKGFSWGSGSSIYADSVRGRFTISRDNAKNTQSLQMNSLELEDTAIYYCAAGRRSSVRSGYEFWGQGTQVTVSS

SEQ ID NO: 1912 - protein, 125 aa, Artificial; identical to SEQ ID NO: 1911
  Nanobody sequence

SEQ ID NO: 1913 - protein, 125 aa, Artificial
  Nanobody sequence
EVQLVESGGGLVQAGGSLRLSCAASGTISSINAMGWFRQAPGKEREFVAAIVKGFSWGSGSTIYADSVKGRFTISRDNAQNTMSLQMNSLELEDTAIYYCAHGRRSSGRSGYEYWGQGTQVTVSS

SEQ ID NO: 1914 - protein, 127 aa, Artificial
  Nanobody sequence
EVQLVESGGGLVQAGGSLRLSCVASGTISAINTMGWFRQAPGKEREFVAALVKGFSWGSGSTIYADSVKGRFTISRDNAKNTMSLQMNSLKLEDTAIYYCAQGRRSSGRSGSGYEYWGQGTQVTVSS

SEQ ID NO: 1915 - protein, 125 aa, Artificial
  Nanobody sequence
EVQLVESGGGLVQAGGSLRLSCAASGTISSINVMGWFRQAPGKEREFVAALVKGFSWGSGSSIYADSVRGRFTISRDNAKNTQSLQMNSLELEDTAIYYCAAGRRSSARSGYEFWGQGTQVTVSS

SEQ ID NO: 1916 - protein, 127 aa, Artificial
  Nanobody sequence
EVQLVESGGGLVQAGGSLRLSCAASGTISSINAMGWFRQAPGKEREFVAAIVKGFSWGSGSTIYADSVKGRATISRDNAKNTMSLQMSSLELEDTAIYYCAHGRRSSGRSASGYEYWGQGTQVTVSS

SEQ ID NO: 1917 - protein, 127 aa, Artificial
  Nanobody sequence
EVQLVESGGGLVQAGGSLRLSCAASGTISSINAMGWFRQAPGKEREFVAAIVKGFSWGSGSIMYADSVKGRFTISRVNAKNTMSLQMNSLELEDTAIYYCAAGRRSSGRSGSGYEYWGQGTQVTVSS

SEQ ID NO: 1918 - protein, 125 aa, Artificial
  Nanobody sequence
EVQLVESGGGLVQAGGSLRLSCAASGTISSINTMGWFRQAPGKEREFVAALVKGFSWGSGSNIVADSVKGRFTISRDNAKNTMSLQMNSLELEDTAIYYCAAGRRSSGRSGYEYWGQGTQVTVSS

SEQ ID NO: 1919 - protein, 127 aa, Artificial; identical to SEQ ID NO: 1916
  Nanobody sequence

SEQ ID NO: 1920 - protein, 127 aa, Artificial
  Nanobody sequence
EVQLVESGGGLVQAGGSLRLSCAASGTISSINAMGWFRQAPGKEREFVAAIVKGFSWGSGSVIYADSVKGRFTISRDNAKNTMSLQMNSLELEDTAIYYCANGRRSSARSGANYEYWGQGTQVTVSS

SEQ ID NO: 1921 - protein, 125 aa, Artificial
  Nanobody sequence
EVQLVESGGGLVQAGGSLRLSCAASGTISSINTMGWFRQAPGKEREFVAAIVKGFSWGSGSTIYADSVKGRFTISRDNAQNTMSLQMNSLELEDTAIYYCAHGRRSSGRSGYEYWGQGTQVTVSS

SEQ ID NO: 1922 - protein, 125 aa, Artificial
  Nanobody sequence
EVQLVESGGGLVQAGGSLRLSCAASGTISSINAMGWFRQAPGKEREFVAAIVKGFSWGSGSTIYADSVKGRFTISRDNAQNTMSLQTNSLELEDTAIYYCAHGRRSSGRSGYEYWGQGTQVTVSS

SEQ ID NO: 1923 - protein, 125 aa, Artificial; identical to SEQ ID NO: 1913
  Nanobody sequence

SEQ ID NO: 1924 - protein, 125 aa, Artificial
  Nanobody sequence
EVQLVESGGGLVQAGGSLRLSCAASGAISSINAMGWFRQAPGKEREFVAAIVKGFSWGSGSTIYADSVKGRFTISRDNAKNTMSLQMSSLELEDTAIYYCAHGRRSSGRSGYEYWGQGTQVTVSS

SEQ ID NO: 1925 - protein, 123 aa, Artificial
  Nanobody sequence
  misc_feature (109)..(109): Xaa can be any naturally occurring amino acid
EVQLVESGGGLVQPGGSLRLSCAASGRPVGGYGMGWFRQGPGKEREFLATTAWNGDFTYYADSVKDRFTISRDNPKNTIYLQMNSLKPEDTAKYYCAASISKGSTSYRXYGFWGQGTQVTVSS

SEQ ID NO: 1926 - protein, 123 aa, Artificial
  Nanobody sequence
EVQLVESGGGLVQPGGSLRLSCAASGRTFGGYGMGWFRQGPGKEREFLATTAWNGDFTYYADSVKDRFTISADNPKNTVYLQMNSLKPEDTAKYYCAASIAKGSRSSRSYGYWGQGTQVTVSS

SEQ ID NO: 1927 - protein, 130 aa, Artificial
  Nanobody sequence
EVQLVESGGGLVQAGSSLRLSCAASGRTFSTFRDYVMGWFRQAPGKEREFVAVISRGGGRTDYDDSVKGRFTISRDNVNNMVYLQMNSLNSEDTGVYYCAADQDRSYGSIGMLPNEYDYWGQGTQVTVSS

SEQ ID NO: 1928 - protein, 127 aa, Artificial
  Nanobody sequence
EVQLVESGGGWVQAGSSLRLSCAASGRTFSDYAMGWFRQVPGKEREFVAAISRGGGKTYYVDSEKGRFTISRDNAKNTVYLQMNSLNSEDTAVYYCAADQDRSYGSIGTLPNDYDYWGQGTQVTVSS

SEQ ID NO: 1929 - protein, 128 aa, Artificial
  Nanobody sequence
EVQLVESGGGLVQAGGSLRLSCIASGLPFSTKSMGWFRQAPGKEREFVARISPGGTSRYYGDFVKGRFAISRDNAKNTAWLQMNSLKAEDTAVYYCASGERSSYIGSNYYRTNEYDYWGTGTQVTVSS

SEQ ID NO: 1930 - protein, 128 aa, Artificial
  Nanobody sequence
EVQLVESGGGLVQPGGSLRLSCIASGLPFSTKSMGWFRQAPGKEREFVARISPGGTSRYYGDFVKGRFAISRDNAKNTTWLQMNSLKAEDTAVYYCASGERSTYIGSNYYRTNEYDYWGTGTQVTVSS

SEQ ID NO: 1931 - protein, 125 aa, Artificial
  Nanobody sequence
QVQLVESGGGLVQPGGSLRLSCAASGFTLADFAIAWFRQAPGKEREGVSGIDSGDGSTYYADSVKGRFTISSDNAKNTVYLQMNSLRPEDTAVYYCARVRTGWGLNAPDYAMDYWGKGTLVTVSS

SEQ ID NO: 1932 - protein, 125 aa, Artificial
  Nanobody sequence
EVQLVESGGGLVQPGGSLRLSCAASGFTLDDYAIAWFRQAPGKEREGVSGIDSGDGSAYYADSVKGRFTISSDNAKNTVYLQMNSLRPEDTAVYYCARVRTGWGLNAPDYAMDYWGKGTLVTVSS

SEQ ID NO: 1933 - protein, 125 aa, Artificial
  Nanobody sequence
EVQLVESGGGLVQPGGSLRLSCAASGFTLDDYAIAWFRQAPGKEREGVSGIDCSDGSTYYANSVKGRFTISSDNAKNTVYLQMNSLRPEDTAVYYCARVRTGWGLRAPDYAMDYWGKGTLVTVSS

SEQ ID NO: 1934 - protein, 125 aa, Artificial
  Nanobody sequence
EVQLVESRGGLVQPGGSLRLSCAASGFYLDDYAIAWFRQAPGKEREGVSGVDSGDGSTYYADSVKGRFTISSDNAKNTVYLQMNSLRPEDTAVYYCARVRTGWGLNAPDYAMDYWGKGTLVTVSS

SEQ ID NO: 1935 - protein, 125 aa, Artificial
  Nanobody sequence
EVQLVESGGGLVQPGGSLRLSCAASGFYLDDYAIAWFRQAPGKEREGVSGIDSGDGSTYYADSVKGRFTISSDNAKNTVYLQMNSLRPEDTAVYYCARVRTGWGLNAPDYAMDYWGKGTLVTVSS

SEQ ID NO: 1936 - protein, 128 aa, Artificial
  Nanobody sequence
EVQLVESGGGLVQAGGSLRLSCAASGRTLSSYAMGWFRQAPGKEREFVARISQGGTAIYYADSVKGRFTISRDNAKNTVYLQMNSLKPEDTAVYYCAKDPSPYYRGSAYLLSGSYDSWGQGTQVTVSS

SEQ ID NO: 1937 - protein, 128 aa, Artificial
  Nanobody sequence
EVQLVESGGGLVQAGGSLRLSCAASGRTLSSYSMGWFRQAPGKEREFVARISPSGSAIYYADSVKGRFTISRDNAKNTVYLQMNSLKPEDTAVYYCAKDPSPYYRGSAYLLSGSYDSWGQGTQVTVSS

SEQ ID NO: 1938 - protein, 114 aa, Artificial
  Nanobody sequence
EVQLVESEGGLVQPGGSLRLSCAASGFAFSNYWMYWIRQAPGKGLEWVSTIKTSGSAAYADFVKGRFTISRDNAKNTLYLQMNSLKPEDTALYYCSTDYAGTVRGQGTQVTVSS

SEQ ID NO: 1939 - protein, 115 aa, Artificial
  Nanobody sequence
EVQLVESGGGLVQPGGSLRLSCAASGFTFSSYRMYWVRQAPGKGLEWVSSIGAVGSLPAYADFVKGRFTISRDNAKNTLYLQMSSLKVEDTALYYCARDYQGAVRGKGTLVTVSS

SEQ ID NO: 1940 - protein, 125 aa, Artificial
  Nanobody sequence
EVQLVESGGGLVQAGGSLRLSCAASGRTFEGNPMGWFRQASGKKREFVASIDWSGGITSYADSVKGRFTISRDNAKNTVYLQMNSLKPEDTAVYYCAASARFGSGSYYDLMYDYWGQGTQVTVSS

SEQ ID NO: 1941 - protein, 125 aa, Artificial
  Nanobody sequence
EVQLVESGGGLVQAGGSLRLSCAASGRTFDSNPMGWFRQAPEKKREFVAIISGNGGITNYANSVKGRFTISRDNAKNTIYLQMNSLKPEDTAVYYCAASDLYGSGSNYDLMYDYWGQGTQVTVSS

SEQ ID NO: 1942 - protein, 125 aa, Artificial
  Nanobody sequence
EVQLVESGGRLVQAGGSLRLSCAASGRTFDSNPMGWFRQAPGKKREFVAIISGNGGITNYANSVKGRFTISRDNAKNTIYLQMNSLKPEDTAVYYCAASGLYGSGSVYDLMYDYWGQGTQVTVSS

SEQ ID NO: 1943 - protein, 117 aa, Artificial
  Nanobody sequence
EVQLVESGGGLVQPGGSLRLSCAASGFTFSSSWMYWVRRAPGKGLEWVSTIKSGGGSTVYADFVKGRFTISRDNAKNTLYLQMNSLKSEDTAVYYCAKDWGASTFVRGQGTQVTVSS

SEQ ID NO: 1944 - protein, 114 aa, Artificial
  Nanobody sequence
  misc_feature (3)..(3): Unknown amino acid, most likely one of the Camelid amino acid residues mentioned for this specific position in Tables A-5 to A-8.
EVXLVESGGGLVEPGGSLRLSCAASGFTFSSSWMYWVRQAPGKGLEWVATIKASSSAVYADFVKGRFTISRDNAKNTLYLQMNSLKPEDTALYYCAKDYAGRLRGQGTHVTVSS

SEQ ID NO: 1945 - protein, 127 aa, Artificial
  Nanobody sequence
EVQLMESGGGLVQAGGSLRLSCAAPGRTFSEYAMGWFRQNPGNEREFVAAISRGGGFTDYADSVKGRFTISRDNAKNTVYLQMNSLKPEDTAVYYCAADGRSSFGIAKRSRYEYDSWGQGTQVTVSS

SEQ ID NO: 1946 - protein, 126 aa, Artificial
  Nanobody sequence
EVQLVESGGGLVQAGGSLRLSCVASGRTFNTYGMGWFRQAPGKEREFVAANNWSGGATSYADSVKGRFTISRDNAKNTVFLQMNTLKPEDTAVYYCAAADRGGGWLVVRENDYDYWGQGTQVTVSS

SEQ ID NO: 1947 - protein, 126 aa, Artificial
  Nanobody sequence
EVQLVESGGGLVQAGGSLRLSCVASGRAFNTYGMGWFRQAPGKEREFVAANNWSGGATSYADSVKSRFTISRDNYKNTVFLQMNTLKPEDTAVYYCAAANRGGGWLTVRENDYDYWGQGTQVTVSS

SEQ ID NO: 1948 - protein, 115 aa, Artificial
  Nanobody sequence
EVQLVESGGGLVQPGGSLRLSCAASGFSISNNWMYWFRQAPGKGHEWVSTIKTGAGSTAYADFVKGRFTISRDNAKNTLYLQMNSLKPEDTALYYCARDWAGTVRGQGTQVTVSS

SEQ ID NO: 1949 - protein, 114 aa, Artificial
  Nanobody sequence
EVQLVESRGGLVQPGGSLRLSCAASGFTFSSSWMYWVRQAPGKGLEWVATIKTGGSAAYADFVKGRFTISRDDAKNTLYLQMNSLKPEDTAQYYCARDYAGRLRGQGTQVTVSS

SEQ ID NO: 1950 - protein, 114 aa, Artificial
  Nanobody sequence
EVQLVESGGGLVQPGGSLRLSCAASGFAFSNYWMYWIRQAPGKGLEWVSTIKTSGSAAYADFVKGRFTISRDNAKNTLYLQMNNLKPEDTALYYCSRDYAGTVRGQGTQVTVSS

SEQ ID NO: 1951 - protein, 114 aa, Artificial
  Nanobody sequence
EVQLVESGGGLVQPGGSLRLSCAASGFAITSYYMYWVRQAPGKGLEWVSTITTTGGRAYADYVKGRFTISRDNAKNTLYLQMNSLKPEDTALYYCARDLGGAVRGQGTQVTVSS

SEQ ID NO: 1952 - protein, 124 aa, Artificial
  Nanobody sequence
EVQLVESGGGLVQAGESLKLSCAASGRPFSTYTMGWFRQAPGKEREIVAASNWSGGSKYYSDSVKGRFTISRDNAKNTVYLQMNSLKPEDTAVYYCATRESGELRIREYEYDYWGQGTQVTVSS

SEQ ID NO: 1953 - protein, 123 aa, Artificial
  Nanobody sequence
EVQLVESGGGVVQAGESLRLSCAASGRSFSNYEMGWFRQAPGTEREFVGTINRRGSSTYYADSVKGRFTISRDNAKNTVFLQMSSLKPEDTAVYYCAAGWLYPSSSSRDYDYWGQGTQVTVSS

SEQ ID NO: 1954 - protein, 129 aa, Artificial
  Nanobody sequence
EVQLVESGGGLVQPGGSLRLSCAASGFTLDDYAIGWFRQAPGKEREGVSCISSSDGSTYYADSVKGRFTISRDNATNTVYLQMNSLKPEDTAVYRCAAVVDYYCPGYESGVFRYGMDYWGKGTLVTVSS

SEQ ID NO: 1955 - protein, 126 aa, Artificial
  Nanobody sequence
EVQLVESGGGLVQAGDSLRLSCTASGRTFSSHTMAWFRQAPGKEREFVGTIVRIFGDTYYADSVKGRFTISRDNAKNTVYLQMNSLKPEDTAVYYCAAALRGTSSDWRAAATYDDWGQGTQVTVSS

SEQ ID NO: 1956 - protein, 123 aa, Artificial
  Nanobody sequence
EVQLVESGGGVVQAGESLRLSCAASGGSFSNYEMGWFRQAPGTEREFVGTINRRGSSTYYEDSVKGRFTISRDNAKNTVYLQMSSLKPEDTANYYCAAGWLYPSSRSRDYDYWGQGTQVTVSS

SEQ ID NO: 1957 - protein, 126 aa, Artificial
  Nanobody sequence
  misc_feature (19)..(19): Unknown amino acid, most likely one of the Camelid amino acid residues mentioned for this specific position in Tables A-5 to A-8.
EVQLVESGGGLVQAGGSLXLSCAASGRTFSDYGMGWFRQAPGKEREFVAVINWSGGSTGYAASVKGRFTISRDNYKNTVYLQMNSLKPDDTAVYYCAADTLHGGAVTTTPARYDYWGQGTQVTVSS

SEQ ID NO: 1958 - protein, 124 aa, Artificial
  Nanobody sequence
EVQLVESGGGLVQAGGSLRLSCAASGRTFSSYAMGWFRQAPGKEREFVAGSNWSGGSTPYADSVVGRFAISRDNAKNTVHLQMNSLKPEDTAVYYCAAGRFSYSTRIPNDYAYWGQGTQVTVSS

SEQ ID NO: 1959 - protein, 114 aa, Artificial
  Nanobody sequence
EVQLVESGGGLVQPGGSLRLSCAASGFTLSGSWMYWVRQAPGKGLEWVSTIKPNGSTASADSVKGRFTISRDNAKNTLYLQMNSLKPEDTALYYCARDFSGNQRGQGTQVTVSS

SEQ ID NO: 1960 - protein, 124 aa, Artificial
  Nanobody sequence
EVQLVESGGGLVQPGGSLRLSCAASGRTFSTYAMGWFRQAPGKEREFVAASNWSGGSKHYADSVLGRFTISRDNYKNTVFLQMNSLKPEDTAVYFCAARGSGELRLREYEYDYWGQGTQVTVSS

SEQ ID NO: 1961 - protein, 124 aa, Artificial
  Nanobody sequence
EVQLVESGGGLVQAGGSLRLSCAASGGTFGSTFMGWFRQTPGKEREFVAAINWSGTFTWYSDSVKGRFSISRDNANNTVHLQMNKLKFEDTAVYYCATDFNGGERRVPASYDSWGQGTQVTVSS

SEQ ID NO: 1962 - protein, 118 aa, Artificial
  Nanobody sequence
EVQLVESGGGLVQTGGSLRLSCAASVINFRLADMDWYRQALGKQRELVASISTGYRTNYADFVKGRFTISRDNAKNTVYLQMDSLKPEDTAVYYCAARDLRGLRVDYWGQGTQVTVSS

SEQ ID NO: 1963 - protein, 127 aa, Artificial
  Nanobody sequence
EVQLVESGGGLVQPGGSLRLSCAASGRFFSTYSMGWFRQVPGKEREPVAAVNWNGISTYYADSVKGRFTISRDNAENTVYLQMNSLKPEDTAVYLCARKRFQYIFGSQQPESDFDSWGQGTQVTVSS

SEQ ID NO: 1964 - protein, 125 aa, Artificial
  Nanobody sequence
EVQLVESGGGSVQAGGSLRLSCAASGQITFSDDAMGWFRQAPGKEREFVSAINWSGGSTSYTDSVRGRFTISRHNAKNTVYLQMNSLKPEDTAVYYCASRPGGGLWTQTHEYAYWGQGTQVTVSS

SEQ ID NO: 1965 - protein, 123 aa, Artificial
  Nanobody sequence
EVQLVESGGGVVRAGESLRLSCAASGRSFSNYEMGWFRQAPGTEREFVGSINRRGSSTYYADSVKGRFTISRDNAKNTVYLQMSSLKPEDTAVYYCAAGWLYPSSRSRDYDYWGQGTQVTVSS

SEQ ID NO: 1966 - protein, 128 aa, Artificial
  Nanobody sequence
RGALVESGGGLVQAGGSLRLSCAASGRPFSSVAMGWFRQAPGKEREFVAAITGDSRSTYYSDSLKGRFTISRDNAKNTVYLQMNSLKPEDTAIYYCAATTYISGTYYYLTKQDMYAYWGQGTQVTVSS

SEQ ID NO: 1967 - protein, 119 aa, Artificial
  Nanobody sequence
EVQLVESGGGLVQPGGSLRLSCAASGFTFSTHWMYWVRQAPGKGLEWVATSTFNILTGTENTYYSDSVKGRFTISRDNAKNTLYLQMNGLKPEDTALYYCARDSSGNLKGQGTQVTVSS

SEQ ID NO: 1968 - protein, 124 aa, Artificial
  Nanobody sequence
EVQLVESGGGLVQAGGSLRLSCAASGLTFSTTAMAWFRQAPGKEREFVAATNWSGGSTPYGDSVIGRFTISRNNAKNTVYLQMNSLKPEDTAVYICAADVSGWAHKGAKEYEYWGQGTQVTVSS

SEQ ID NO: 1969 - protein, 123 aa, Artificial
  Nanobody sequence
EVQLVESGGGVVQAGESLRLSCAASGRSFSDYEMGWFRQAPGTEREFVATINWRGSSTYYADSVKGRFTISRDSAKNTVYLQMSSLKPLDTAVYYCAAGRLFPSSRSRDYDYWGQGTQVTVSS

SEQ ID NO: 1970 - protein, 123 aa, Artificial
  Nanobody sequence
EVQLVESGGGVVQAGESLRLSCAASGRSFSDYEMGWFRQAPGTEREFVASINRRGSSTFYADSVKGRFTISRDNTKNTVYLQMSSLKPEDTAVYLCAAGWLFPSSRSRDYDYWGQGTQVTVSS

SEQ ID NO: 1971 - protein, 123 aa, Artificial
  Nanobody sequence
EVQLVESGGGLVQAGGSRRVSCAASGLTFSDYSMAWFRQAPGKEREFVAAHAWLASTTDYADSVKGRFTISRDNAKNTVYLQMNSLKPEDTAAYYCAAGQRYLSRVSQGYEYWGQGTQVTVSS

SEQ ID NO: 1972 - protein, 123 aa, Artificial
  Nanobody sequence
EVQLVESGGGLVQAGGSLRLSCEASERTFSTYRMGWFRQSPGREREFVTSFNWSGGSTYYADSVKGRFIIATDDAKNTVYLRMNSLKPEDTAVYYCAGYSSGSYYSPRSYGVWGQGTQVTVSS

SEQ ID NO: 1973 - protein, 128 aa, Artificial
  Nanobody sequence
EVQLVESGGGLVQAGGSLRLSCAASGRTFSTYATGWFRQAPGKEREFVAATRGSNGLAYYGNSAKGRFTISRDNAKNTVYLQMNSLKPEDTAVYYCASSNSRCIGDGCYDEPHEYAYWGQGTQVTVSS

SEQ ID NO: 1974 - protein, 124 aa, Artificial
  Nanobody sequence
EVQLVESGGGLVQPGGSLRLSCAASGFTLDDYTMSWVRQAPGKGLEWVSSISRDGGRTYYAGSMKGRFTISRDNAKNTLYLQMSSLKPEDTAVYYCAAATFYTTSTYISLYDYWGQGTQVTVSS

SEQ ID NO: 1975 - protein, 122 aa, Artificial
  Nanobody sequence
EVQLVESGGGLVQPGGSLRLSCAASGSFFSIKSMGWYRQAPGKQRELVAGIASGVTNYADSVKGRFTISRDGAKNTVYLQMNSLKPEDTAVYYCNAVGERLANTGVTEYDYWGQGTLVTVSS

SEQ ID NO: 1976 - protein, 127 aa, Artificial
  Nanobody sequence
EVQLVESGGGLVQPGGSLRLSCAASGRFFSTYAMGWFRQVPGKEREPVAAVNWNGISTYYADSVKGRFTISRDNAENTVYLQMNSLKPEDTAVYLCARKRFQYIFGSQQPESDFDSWGQGTQVTVSS

SEQ ID NO: 1977 - protein, 119 aa, Artificial
  Nanobody sequence
EVQLVESGGGLVQSGDPLRLSCAASGPTYTMAWFRQAPGEEREFVAVISGGSTNYADSVKGRFTVSADNAKNTMYLQMNSLKPEDTAVYYCAGAGFYTTGTYYSLYDYWGQGTQVTVSS

SEQ ID NO: 1978 - protein, 124 aa, Artificial
  Nanobody sequence
KVQLVESGGGLVQAGGSLRLSCAASGRSFSTYAMGWFRQAPGKEREFVAASNWSGGSKNYADSVLGRFTISRDNAKNTVYLQMNSLKPTDTAVYYCAAKGSGDLRLREYEYDYWGQGTQVTVSS

SEQ ID NO: 1979 - protein, 124 aa, Artificial
  Nanobody sequence
EVQLVESGGGSVQAGGSLRLSCAASGRTIFSDYAMGWFRQAPGKEREFVSAINWSGGSTTYADSVKGRFTISRDNYKNTVYLQMNSLKPEDTAVYYCASRAGGGLWTQTHEYVDWGQGTQVTVS

SEQ ID NO: 1980 - protein, 124 aa, Artificial
  Nanobody sequence
EVQLVESGGGLVQAGGSLRLSCAASGRTFSTYAMGWFRQAPGKEREFVAASNWSGGSKYYADSVKGRFTISRDNAKNTVYLQMNSLKPEDTAVYYCAARGSGELRLREYEYDYWGQGTQVTVSS

SEQ ID NO: 1981 - protein, 123 aa, Artificial
  Nanobody sequence
EVQLVESGGGVVQAGESLRLSCAASGRIFSDYEMGWFRQAPGTEREFVAAISWRGSSTYYADSVKGRFTISRDNAKNTVYLQMSSLKPEDTAVYYCAAGRLFPSSRSRDYDYWGQGTQVTVSS

SEQ ID NO: 1982 - protein, 115 aa, Artificial
  Nanobody sequence
EVQLVESGGGLVQPGGSLRLSCAASGFNFSNYRMYWVRQAPGKGLEWVSSIGAIGNVPAYADFVKGRFTISRDNAKNTLYLEMSSLKVEDTALYYCARDYQGVVRGKGTLVTVSS

SEQ ID NO: 1983 - protein, 125 aa, Artificial
  Nanobody sequence
EVQLVESGGGLVQAGGSLRLSCAASGIIFSDNVMGWFRQAPGKEREFVAAIAGRGSRLDYADSVKGRFTISRDNAKNTVYLQMNSLKPEDTATYYCAAKPYGRVFYTEGSNYDFWGQGTQVTVSS

SEQ ID NO: 1984 - protein, 114 aa, Artificial
  Nanobody sequence
EVQLVESGGGLVQPGGSLRLSCAASGFTFSGYWMYWLRQAPGKGLEWVSTIKTTGGGAYAEFVKGRFTISRDNAKNTLYLQMNNLKPEDTALYYCARDFEGTVRGQGTQVTVSS

SEQ ID NO: 1985 - protein, 123 aa, Artificial
  Nanobody sequence
EVQLVESGGGVVQAGESLRLSCAASGYNVKDYEMGWFRQAPGTEREFAAAINWRGSSTYYADSVKGRFTISRDNAKNTVYLQMSSLKPEDTAVYYCAAGRLYPSSRSRDYDYWGQGTQVTVSS

SEQ ID NO: 1986 - protein, 129 aa, Artificial
  Nanobody sequence
EVQLVESGGGLVQAGDSLRLSCAASGRSFSRDTMGWFRQAPGKEREFVAAINWSGGSRSYADSVLGRFTISRDNAKNTVYLQMNRLKPEDTSIYYCATDRGGHFSVGYYYPSDDSWDYWGQGTQVTVSS

SEQ ID NO: 1987 - protein, 123 aa, Artificial
  Nanobody sequence
EVQLVESGGGLVQAGVSLRLSCAASGRAFSNFDMGWFRQAPGREREFVAAINRSGSSTYVSASVKGRFTISRDNAKNTMSLQMNNLKPEDTAVYVCATGLLFPSSAERNYDYWGQGTQVTVSS

SEQ ID NO: 1988 - protein, 114 aa, Artificial
  Nanobody sequence
QVQLVESGGGLVQPGGSLRLSCAASGFTFSSSWMYWVRQAPGKGLEWVATVKTNNSTVYADFVKGRFTISRDNAKNTLYLRMNSLKPEDTALYYCARDYAGRLRGQGTQVTVSS

SEQ ID NO: 1989 - protein, 123 aa, Artificial
  Nanobody sequence
EVQLVESGGGVVQAGESLRLSCAASGRSFSDYEMGWFRQAPGTEREFVAAISWRGSSTYYADSVKGRFTISRDNAKNTVYLQMSSLKPEDTAVYYCAAGRLYPSSRSRDYDYWGQGTQVTVSS

SEQ ID NO: 1990 - protein, 123 aa, Artificial
  Nanobody sequence
EVQLVESGGGAVQAGESLRLSCAASGRSFSNYEMGWFRQAPGTERAFVGTISRRGSSTYYADSVKGRFTISRDNAKNTVYLQMSSLKPEDTAVYYCAAGQLFPSSNSRDYDYWGQGTQVTVSS

SEQ ID NO: 1991 - protein, 115 aa, Artificial
  Nanobody sequence
EVQLVESGGGLVQPGGSLRLSCAASGFSISDNWMYWFRQAPGKGHEWVSTIKTGTGSTAYADSVKGRFTISRDNAKNTLYLQMNSLKPEDTALYYCARDWDGTVRGQGTQVTVSS

SEQ ID NO: 1992 - protein, 126 aa, Artificial
  Nanobody sequence
EVQLVESGGGMVQAGGSLRLSCTASGLTDNSYAMGWFRRAPGKEREFLTGLTLSGGSTYYADSVKGRFTTSRDSQKNTVSLQMNSLKPEDTAVYYCAANRFGYGSAAYTPDNYNYWAQGTQVTVSS

SEQ ID NO: 1993 - protein, 128 aa, Artificial
  Nanobody sequence
EVQLVESGGGLVQAGGSLRLSCAASGRTFSTYATGWFRQAPGKEREFVSAMRGSNGLAYYANSVKGRFTISRDNAKNTVYLQMNSLKPEDTAVYYCASSESRCIGDGCYDEPHEYAYWGQGTQVTVSS

SEQ ID NO: 1994 - protein, 123 aa, Artificial
  Nanobody sequence
EVQLVESGGGVVQAGESLRLSCAASGRSFSNYEMGWFRQAPGTEREFVAAISRRRSSTYYADSVKGRFTISRDNAKNTVYLQMSSLKPEDTAVYYCAAGALFPSSRSRDYDYWGQGTQVTVSS

SEQ ID NO: 1995 - protein, 123 aa, Artificial
  Nanobody sequence
EVQLVESGGGVVQAGESLRLSCAASGRSFSNYEMGWFRQAPGTEREFVSTISRRGSSTYYADSVKGRFTISRDNAKNTVYLQMSSLKPEDTAVYYCAAGQLFPSSRPRDYDYWGQGTQVTVSS

SEQ ID NO: 1996 - protein, 123 aa, Artificial
  Nanobody sequence
EVQLVESGGGVVQAGESLRLSCAASGRSFSNFEMGWFRQAPGTEREFVATINWRGSSTYYADSVKGRFTISRDNAENTVYLQMSSLKPEDTAVYYCAAGRLFPSSRSRDYDYWGQGTQVTVSS

SEQ ID NO: 1997 - protein, 123 aa, Artificial
  Nanobody sequence
EVQLVESGGGVVQAGESLRLSCAASGRSFSNYEMGWFRQAPGTEREFVGTINRRGSSTYYADSVKGRFTISRDNAKNTVFLQMSSLKPEDTAVYYCAAGWLFPSSLSRDYDFWGQGTQVTVSS

SEQ ID NO: 1998 - protein, 114 aa, Artificial
  Nanobody sequence
EVQLVESGGGLVQPGGSLRLSCAASGFAFSNRWMYWVRQAPGKGLEWVSTIKPNGSTAYADFVKGRFTFSKDNAKNTLYLQMNSLKPEDTALYYCSTDYAGTVRGQGTQVTVSS

SEQ ID NO: 1999 - protein, 123 aa, Artificial
  Nanobody sequence
EVQLVESGGGVVQAGESLRLSCAASGRSFSNYEMGWFRQAPGTEREFVGTISRRGSSTYYADSVKGRFTISRDNAKNTVYLQMSSLKPEDTAVYYCAAGQLFPSSHSRDYDYWGQGTQVTVSS

SEQ ID NO: 2000 - protein, 114 aa, Artificial
  Nanobody sequence
EVQLVESGGGLVQPGGSLRLSCAASGFTFSSSVMFWLRQAPGKGLEWVSTIKPSGSTIYPNPAKGRFTISRDNAKNTLYLQMDNLAPEDTALYYCARDIGGAVRGQGTQVTVSS

SEQ ID NO: 2001 - protein, 123 aa, Artificial
  Nanobody sequence
EVQLVESGGGVVQAGESLRLSCAASGRSLNNEEMGWFRQAPGTEREFVATISRRGTGTYYADSVKGRFTISRDNAKNTVYLQMSSLKPEDTAVYYCAAGQLFPSSRSRDYDYWGQGTQVTVSS

SEQ ID NO: 2002 - protein, 123 aa, Artificial
  Nanobody sequence
  misc_feature (3)..(3): Unknown amino acid, most likely one of the Camelid amino acid residues mentioned for this specific position in Tables A-5 to A-8.
EVXLVESGGGVVQAGESLRLSCAASGRSFSDYGMGWFRQPPGTEREFVAAINRRGSSTYYADSVKGRFTISRDSAKNTVYLQMSSLKPEDTAVYFCAAGQLYPSSASRDYDYWGQGTQVTVSS

SEQ ID NO: 2003 - protein, 115 aa, Artificial
  Nanobody sequence
EMQLVESGGGLVQPGGSLRLSCAASGFSISNNWMYWFRQAPGKGHEWVSTIKTGAGSTAYADFVKGRFTISRDNAKNTLYLQMNSLKPEDTALYYCARDWAGTVRGQGTQVTVSS

SEQ ID NO: 2004 - protein, 123 aa, Artificial
  Nanobody sequence
EVQLVESGGGLVQAGGSRRVSCAASGLTFSDYSMAWFRQAPGKEREFVAAHAWLASRTDYADSVKGRFTISRDNAKNTVYLQMNSLKPEDTAAYYCAAGQRYLSRVSQGYEYWGQGTQVTVSS

SEQ ID NO: 2005 - protein, 115 aa, Artificial
  Nanobody sequence
EVQLVESGGGLVQPGGSLRLSCAASGFTFSDSWMYWVRQAPGKELEWVSTISNSGFTTRYADSVKGRFTISRDNAKNTLYLQMNSLKPEDTSLYYCARDLGGALRGQGTQVTVSS

SEQ ID NO: 2006 - protein, 124 aa, Artificial
  Nanobody sequence
EVQLVESGGGLVQAGGSLRLSCAASGGTFSTYAMGWFRQAPGKEREFVAASNWSGGSTPYADSVMGRFTISRDNAKNTVYLQMGSLKPEDTAVYYCAADVSGWAHKGAKEYEYWGQGTQVTVSS

SEQ ID NO: 2007 - protein, 115 aa, Artificial
  Nanobody sequence
  misc_feature (114)..(114): Unknown amino acid, most likely one of the Camelid amino acid residues mentioned for this specific position in Tables A-5 to A-8.
EVQLVESGGGLVQPGGSLRLSCVASGSIFTANDMAWYRQAPGKQREWVATITRGDITLYAHSVKGRFTISRDYAANTVYLQMNSLKPEDTAVYYCNAPNNYYGDWGQGTQVTVXS

SEQ ID NO: 2008 - protein, 128 aa, Artificial
  Nanobody sequence
EVQLVESGGGLVQPGGSLRLSCAASGFTLDYYHIGWFRQAPGKEREGVSCIDSSDGSTYYADSVKGRFTISRDNAKNTVYLQMNSLKPEDTAVYYCAAGPTWTQRNDRSWIFYEYDYWGQGTQVTVSS

SEQ ID NO: 2009 - protein, 125 aa, Artificial
  Nanobody sequence
  misc_feature (3)..(3): Unknown amino acid, most likely one of the Camelid amino acid residues mentioned for this specific position in Tables A-5 to A-8.
EVXLVESGGGSVQAGGSLGLSCTASEGTFSRYTLAWFRQEPGKEREFVAAISLSGTTAFYSNSVEGRFTVSRDNAKNTEYLQMNSLKSEDTAVYYCAARSRDEFYYADDARYVYWGQGTQVTVSS

SEQ ID NO: 2010 - protein, 125 aa, Artificial
  Nanobody sequence
EVQLVESGGGLVRAGGSLRLSCAASGRAFSNYAMGWFRRAPGRERELVGAITWSGGGTYYADSVKGRFTISRDNAKSTVYLQMNSLKPEDTAVYSCAAPRYERMMSRLEVDYGYWGQGTQVTVSS

SEQ ID NO: 2011 - protein, 114 aa, Artificial
  Nanobody sequence
EVQLVESGGGFVQPGGSLRLSCAASASIFSGYTMGWYRQAPGKERELVTSISHRGGTNYADSVKGRFTISRENAKSTVYLQMNSLKPEDTGVYYCNRLINEASWGQGTQVTVSS

SEQ ID NO: 2012 - protein, 114 aa, Artificial
  Nanobody sequence
EVQLVESGGGFAQPGGSLRLSCAASASIFSGYTMAWYRQAPGKERELVTSISHRGGTNYADSVKGRFTISRENAKSTVYLQMDSLKPEDTGVYYCNRLINEASWGQGTQVTVSS

SEQ ID NO: 2013 - protein, 114 aa, Artificial
  Nanobody sequence
EVQLVESGGGFVQPGGSLRLSCAASASIFSGYTMGWYRQAPGKERELVTSISHRGGTNYADSVKGRFTISRENAKSTVYLQMNSLKPEDTGVYFCNRLINEASWGQGTQVTVSS

SEQ ID NO: 2014 - protein, 114 aa, Artificial
  Nanobody sequence
EVQLVESGGGLVQPGGSLRLTCAASGSIASNSAMGWYRQLPGKQRELIAHITSRGHTTYADFVKGRFTISRDNVKNMVYLQMNSLKPEDTAVYYCNKILHSDYWGQGTQVTVSS

SEQ ID NO: 2015 - protein, 114 aa, Artificial
  Nanobody sequence
EVQLVESGGGLVQPGGSLRLPCVASGSIFRGNTMGWYRQTPGKQRELVASITSRGYTSYADSVKGRFTISRDNAKNTVYLQMNSLKPEDTAVYYCNRIVVESQWGQGTQVTVSS

SEQ ID NO: 2016 - protein, 114 aa, Artificial
  Nanobody sequence
EVQLVESGGGLVQPGGSPRLSCVASGSIFRGNTMGWYRQTPGKQRELVASITSRGYTSYADSVKGRFTISRDNAKNTVYLQMNSLKPEDTAVYYCNRIVVESQWGQGTQVTVSS

SEQ ID NO: 2017 - protein, 114 aa, Artificial
  Nanobody sequence
  misc_feature (19)..(19): Unknown amino acid, most likely one of the Camelid amino acid residues mentioned for this specific position in Tables A-5 to A-8.
EVQLVESGGGFVQPGGSLXLSCAASASIFSGYTMGWYRQAPGKERELVTSISHRGGTNYADSVKGRFTISRENAKSTVYLQMNSLKPEDTGVYYCNRLINEASWGQGTQVTVSS

SEQ ID NO: 2018 - protein, 114 aa, Artificial
  Nanobody sequence
  misc_feature (72)..(72): Unknown amino acid, most likely one of the Camelid amino acid residues mentioned for this specific position in Tables A-5 to A-8.
EVQLVESGGGFVQPGGSLRLSCAASASIFSGYTMGWYRQAPGKERELVTSISHRGGTNYAESVKGRFTISRXNAKSTVYLEMNSLKPEDTGVYYCNRLINEASWGQGTQVTVSS

SEQ ID NO: 2019 - protein, 114 aa, Artificial
  Nanobody sequence
  misc_feature (3)..(3): Unknown amino acid, most likely one of the Camelid amino acid residues mentioned for this specific position in Tables A-5 to A-8.
  misc_feature (72)..(72): Unknown amino acid, most likely one of the Camelid amino acid residues mentioned for this specific position in Tables A-5 to A-8.
EVXLVESGGGFVQPGGSLRLSCAASASIFSGYTMGWYRQAPGKERELVTSISHRGGTNYADSVKGRFTISRXNAKSTVYLQMNSLKPEDTGVYYCNRLINEASWGQGTQVTVSS

SEQ ID NO: 2020 - protein, 114 aa, Artificial
  Nanobody sequence
  misc_feature (19)..(19): Unknown amino acid, most likely one of the Camelid amino acid residues mentioned for this specific position in Tables A-5 to A-8.
EVQLVESGGGFVQPGGSLXLSCAASASIFSGYTMAWYRQAPGKERELVTSISHRGGTNYADSVKGRFTISRENAKSTVYLQMNSLKSEDTGVYYCNRLINEASWGQGTQVTVSS

SEQ ID NO: 2021 - protein, 114 aa, Artificial
  Nanobody sequence
  misc_feature (108)..(108): Unknown amino acid, most likely one of the Camelid amino acid residues mentioned for this specific position in Tables A-5 to A-8.
EVQLVESGGGFVQPGGSLRLSCAASASIFSGYTMGWYRQAPGKERELVTSISHRGGTNYADSVKGRFTISRENAKSTVYLQMNSLKPEDTGVYYCNRLINEASWGQGXQVTVSS

SEQ ID NO: 2022 - protein, 128 aa, Artificial
  Nanobody sequence
EVQLVESGGGLVQAGGSLRLSCAASIRTFSSYNMAWFRQAPGKEREFVTAIIQSGGTTYYDDSVKGRFTISRDNAKNTVYLQMNSLKPEDTAVYYCAARSAYASGIYYYTREVSYNYWGQGTQVTVSS

SEQ ID NO: 2023 - protein, 123 aa, Artificial
  Nanobody sequence
  misc_feature (3)..(3): Unknown amino acid, most likely one of the Camelid amino acid residues mentioned for this specific position in Tables A-5 to A-8.
  misc_feature (48)..(48): Xaa can be any naturally occurring amino acid
  misc_feature (105)..(105): Xaa can be any naturally occurring amino acid
EVXLVESGGGVVQAGESLRLSCAASGRSFSNYEMGWFRQAPGTEREFXGTISRRGSSTYYADSVKGRFTISRDNAKNTVYLQMSSLKPEDTAVYYCAAGQLFPSXHSRDYDYWGQGTQVTVSS

SEQ ID NO: 2024 - protein, 117 aa, Artificial
  Nanobody sequence
  misc_feature (13)..(13): Unknown amino acid, most likely one of the Camelid amino acid residues mentioned for this specific position in Tables A-5 to A-8.
EVQLVESGGGLVXPGGSLRLSCVASGFPFSKTWMYWFRQAPGKGLEQVSSIHTGFGVGVTYYADAVKGRFTISRDNAKNTLYLQMNSLKPEDTALYYCATDIQGTTRGQGTQVTVSS

SEQ ID NO: 2025 - protein, 124 aa, Artificial
  Nanobody sequence
EVQLVESGGGLVQPGGSLRLSCAASGFTLDDYTIAWFRQAPGKEREGVSCISSSALITFYADSVKGRFTISRBNAKNTVYLQMNSLKPDDTAVYYCAADRYYYCSGWPDESAYWGQGTQVTVSS

SEQ ID NO: 2026 - protein, 124 aa, Artificial
  Nanobody sequence
EVQLVESGGGLVQPGGSLRLSCAASGFTLDDYTIAWFRQAPGKEREGVSCISSSALITFYADSVKGRFTISRDNAKNTVYLQMNSLKPDDTAVYYCAADRYYYCSGWPDESAYWGQGTQVTVSS

SEQ ID NO: 2027 - protein, 124 aa, Artificial
  Nanobody sequence
EVQLVESGGGLVQPGGSLRISCAASGFTLDDYTIAWFRQAPGKEREGVSCISSSALITFYADSVKGRFTISRDNAKNTVYLQMNSLKPEDTAVYYCAADRYYYCSGWPDESAYWGQGTQVTVSS

SEQ ID NO: 2028 - protein, 123 aa, Artificial
  Nanobody sequence
EVQLVESGGGVVQAGESLRLSCAASGRSFSNYEMGWFRQAPGTEREFVGSINLRGSSTYYADSVKGRFTISRDNAKNTVYLQMSGLKPDDTAVYYCAAGWLYPSSRSRDYDYWGQGTQVTVSS

SEQ ID NO: 2029 - protein, 124 aa, Artificial
  Nanobody sequence
EVQLVESGGGLVQPGGSLRLSCAASGFTLDDYTIAWFRQAPGKEREGVSCISSSALITFYADSVKGRFTISRDNAKNTVYLQMNSLKPEDTAVYYCAADRYYYCSGWPDENAYWGQGTQVTVSS

SEQ ID NO: 2030 - protein, 123 aa, Artificial
  Nanobody sequence
  misc_feature (3)..(3): Unknown amino acid, most likely one of the Camelid amino acid residues mentioned for this specific position in Tables A-5 to A-8.
  misc_feature (79)..(79): Unknown amino acid, most likely one of the Camelid amino acid residues mentioned for this specific position in Tables A-5 to A-8.
  misc_feature (82)..(82): Unknown amino acid, most likely one of the Camelid amino acid residues mentioned for this specific position in Tables A-5 to A-8.
  misc_feature (92)..(92): Xaa can be any naturally occurring amino acid
  misc_feature (104)..(104): Xaa can be any naturally occurring amino acid
EVXLVESGGGVVQAGESLRLSCSASGRSFSNYEMAWFRQAPGTEREFVATINRRGSSTYYADSVKGRFTISRBNAKNTXVLQMSSLKPEDTXVYYCAAGWLFPXSRSRDYDYWGQGTQVTVSS

SEQ ID NO: 2031 - protein, 121 aa, Artificial
  Nanobody sequence
EVQLVESGGGLVQAGGSLRLSCAASGPLFENYVIGWFRQGPGKEREGVSCIRCTGGSTTYADSVKGRFTLSRDNAKNTLYLQMNSLTPDDAAVYYCAKPRAGMAVYEYDAWGQGTQVTVSS

SEQ ID NO: 2032 - protein, 126 aa, Artificial
  Nanobody sequence
EVQLVESGGGLVQPGGSLRLSCTASGLTFSTYGMGWFRQAPGKNREFVAAIKRGGSAYYSHPVRGRFTISRDNGKNTVYLQMNSLKPEDTAVYYCAADQDPQELLPFGLANEYDYWGQGTQVTVSS

SEQ ID NO: 2033 - protein, 122 aa, Artificial
  Nanobody sequence
EVQLVESGGGLVQPGGSLRLSCAASGSFFSIKSMGWYRQAPGKQRELVAGITSGGTNYADSVKGRFTISRDSAKNTVYLQMNSLKPEDTAVYYCNAVGERLAYTGVTEYDYWGQGTLVTVSS

SEQ ID NO: 2034 - protein, 124 aa, Artificial
  Nanobody sequence
EVQLVESGGGLVQPGSSLRLSCAASGFTLDDYTIAWFRQAPGKEREGVSCISSVDGSTNYGYPMKGRFTISTDNAKNMVYLQMNSLKPEDTAVYYCAAMKMCTRAFYGDPVDYWGKGTLVTVSS

SEQ ID NO: 2035 - protein, 120 aa, Artificial
  Nanobody sequence
  misc_feature (101)..(101): Xaa can be any naturally occurring amino acid
EVQLVESGGGLVQAGGSLRLACAASGLAFSRSAMGWFRQAPGKERENVAAISGGGLITDYTDSVKGRFTVSRDNAKNTVYLQMNNLKPEDTAVYYCAASLXGSLTEYDYWGRGTQVTVSS

SEQ ID NO: 2036 - protein, 118 aa, Artificial
  Nanobody sequence
EVQLVESGGGLVQPGGSLRLSCAASGFTFSSYMMSWVRQAPGKGLEWVSFISSGGGISSYADSVEGRFTISRDNAKNTLYLHMNSLKPEDTAVYYCTKGRGDTRYDYRGQGTQVTVSS

SEQ ID NO: 2037 - protein, 124 aa, Artificial
  Nanobody sequence
EVQLVESGGGLVQAGGSLRLSCAASGRTFSSYVMGWFRQAPGKEREFVAAISSGGSITDYGDSVKGRFTISRDNAKNTVNLQMNSLKPEDTAVYYCAAQDGRGILTRANHYDYWGQGTQVTVSS

SEQ ID NO: 2038 - protein, 128 aa, Artificial
  Nanobody sequence
EVQLVESGGGLVQAGGSLRLSCAASGFTFDDYAIGWFRQAPGKEREGVSCISSSDGSTYYADSVKGRFTISSDNAKNTVYLQMNSLKPEDTAVYYCATGLLDCPQRYGSSWYKGIGYWGQGTQVTVSS

SEQ ID NO: 2039 - protein, 126 aa, Artificial
  Nanobody sequence
EVQLVESGGGLVQVGGSLRLSCAASEGTFNSYTMGWFRQAPGKEREFVAAISWIASVTEHSDSVKGRFAISRDDAKNTVYLEINTLKPEDTATYYCARRRAPYYHISRRTDEYDFWGRGTQVTVSS

SEQ ID NO: 2040 - protein, 124 aa, Artificial
  Nanobody sequence
EVQLVESGGGLVQAGDSLRLSCAASGRAFSTYTMGWFRQAPGKEREFVAVRTGKTGGTRYADSVKGRFTISGDNAKNTVYLQMNRLEPEDTAVYHCAASAIPVVVTTPEEYDYWGQGTQVTVSS

SEQ ID NO: 2041 - protein, 128 aa, Artificial
  Nanobody sequence
EVQLVESGGGLVQAGGSLRLSCAASGFTLDDYAIGWFRQAPGKEREGVSCISSSDGSTDYADSVKGRFTISSDNAKNTVYLQMNSLKPEDTAVYYCAAYYKPWKYYCSDYGSYEHDAWGQGTQVTVSS

SEQ ID NO: 2042 - protein, 121 aa, Artificial
  Nanobody sequence
EVQLVESGGGLVQAGGSLRLSCAASGLTFSTYTMGWFRQAPGKEREFVSTISGSGLIKDSVKDRFTISRDNAKNTVYLQMNSLKPEDTAVYYCAARLSGWTSSRDKDYGYWGQGTQVTVSS

SEQ ID NO: 2043 - protein, 133 aa, Artificial
  Nanobody sequence
EVQLVESGGGLVQPGGSLTLSCAASGFTLDRYAIGWFRQAPGKQREGVACISNLNSTDSKTYYADFVKGRFTISRDNAKNTVYLQMNSLKPEDTAVYYCATPPYSDSYCLHREWVGLVPDDYWGQGTQVTVSS

SEQ ID NO: 2044 - protein, 123 aa, Artificial
  Nanobody sequence
EVQLVESGGGLVQAGGSLRLSCAASGRTFSSYTFGWFRRAPDKDREFVAQISWIGGRTAYADSVKGRFTISRDNAKSTVYLQMNSLNTEDTAVYYCAADRDVWVLSEHLYDYWGQGTQVTVSS

SEQ ID NO: 2045 - protein, 124 aa, Artificial
  Nanobody sequence
EVQLVESGGGLVQAGGSLRLSCAASGGTVTNYGRAWFRQAPGKERDFVAGVNWSGSSTHYLDSVKGRFTISRDNAKNTVYLQMNNLKPEDTAVYYCAAAEGSTWYLESNLYNHWGQGTQVTVSS

SEQ ID NO: 2046 - protein, 126 aa, Artificial
  Nanobody sequence
EVQLVESGGGLVQVGGSLRLSCAASEHTFNSYTMGWFRQAPGKEREFVAAISWIASVTEYSDSVKGRFTISRDDAKKTVHLEINNLKPEDTATYYCARRRMPYYHISRRADEYDFWGRGTQVTVSS

SEQ ID NO: 2047 - protein, 124 aa, Artificial
  Nanobody sequence
EVQLVESGGGLVQAGGSLELSCVASGLTFDTYVTGWFRQAPGKEREFVATISGSGLITSYEDSVKDRVTISRDNAKNTVYLQMNSLKPGDTAVYYCAARLSGWTSSRDYDYDYWGQGTQVTVSS

SEQ ID NO: 2048 - protein, 124 aa, Artificial
  Nanobody sequence
EVQLVESGGGLVQAGDSLRLSCAASGRTLANYGMGWFRQAPGKEREFVAGVNWSGSSTYYLDSVKGRFTISRDNAKNTVYLQMNSLKPEDTAVYYCAAAEGSTWYLQPNLYNLWGQGTQVTVSS

SEQ ID NO: 2049 - protein, 124 aa, Artificial
  Nanobody sequence
EVQLVESGGGLVQAGGSLRLSCAASGRTFSTYTMAWFRQTPGKERDLVAGITGSGLRTYYADSVKGRFTISRDNAKNTVDLQMNSLKPEDTAVYYCAASLTGWIPSSLQSYNYRGQGTQVTVSS

SEQ ID NO: 2050 - protein, 126 aa, Artificial
  Nanobody sequence
EVQLVESGGGLVQVGGSLRLSCAASERTFNSYTMGWFRQAPGKEREFVAAISWIASVTDYSDSVKGRFTISRDDDKNTVYLEINNLKPEDTATYYCARRRMPYYHISRRTDEYDFWGRGTQVTVSS

SEQ ID NO: 2051 - protein, 121 aa, Artificial
  Nanobody sequence
EVQLVESGGGLVQAGGSLRLSCAASGLTFSTYTMGWFRQAPGKEREFVATISGSGLIKDSVKDRFTVSRDNAKNTVYLQMDSLKPEDTAVYYCAARLSGWTSSRDYDYNYWGQGTQVTVSS

SEQ ID NO: 2052 - protein, 123 aa, Artificial
  Nanobody sequence
EVQLVESGGGLVQAGDSVRLSCAASGRTFSVDTNTMGWYRQAPGKEHEFVAAISWSGTTVYADSVKGRFTISKDNAKNTIYLQMNSLKPEDTAVYVCAAERGKYATTGNYDYWGQGTQVTVSS

SEQ ID NO: 2053 - protein, 125 aa, Artificial
  Nanobody sequence
EVQLVESGGGLVQAGGSLRLSCAASGIIFTNYAMAWFRQAPGKEREFVAAISWRNSSTNYADSVKGRFTISRDNAKNTVYLQMNSLKPEDTALYTCAARWRPQVDYVDHWSYTYWGQGAQVTVSS

SEQ ID NO: 2054 - protein, 111 aa, Artificial
  Nanobody sequence
EVQLVESGGDLVQPGGSLRLSCEASGRIFGFNGMGWYRQVQGKQRELVARILSSISTYYVDSVKGRFTISRDNARNTVYLQMDSLKPEDTAIYYCNFEDYWGRGTQVTVSS

SEQ ID NO: 2055 - protein, 124 aa, Artificial
  Nanobody sequence
EVQLVESGGGLVQAGGSLRLSCVASGRTFRSQSMGWFRQAPGKEREIVAAISSDGISTFYTDSVKGRFTISRDNAKNTGYLQMNSLKPEDTAVYYCAATTYSSYTTSGLLYPYWGQGTQVTVSS

SEQ ID NO: 2056 - protein, 126 aa, Artificial
  Nanobody sequence
EVQLVESGGGLVQPGGSLRLSCAASGITLDDYATGWFRQAPGKEREGVSCISGNHGSTYYADSVKGRFTISRDNAKNTVYLQMNSLKPEDTAVYYCAALRWGCTLYGDYEGPYDYWGQGTQVTVSS

SEQ ID NO: 2057 - protein, 128 aa, Artificial
  Nanobody sequence
EVQLVESGGGLVQPGGSLRLSCAASGFTLDDYPIGWFRQAPGKEREGVSCISSSDGSTYYADSVKGRFTISRDNAKNTVYLQMNSLKPEDTAVYYCAAVPYRTCEGYDYIHYYPDDYWGQGTQVTVSS

SEQ ID NO: 2058 - protein, 124 aa, Artificial
  Nanobody sequence
EVQLVESGGGLVQAGGSLRLSCAASGGTFSTYVMAWFRQAPGKEREFVTTISGSGLRTSYKDSVEDRFTISRDNAKNTVYLQMNSLKPEDTAVYYCAARLSGWTSSRDYDYNYWGQGTQVTVSS

SEQ ID NO: 2059 - protein, 120 aa, Artificial
  Nanobody sequence
EVQLVESGGGLVQAGDSLRLSCTASGGTFITTYVMGWFRQAPGKEREFVAAIRRSGESGDTSYADSVKGRFTISRDNAKNTVYLQMNSLKPEDTAVYLCAAGTMRAYNYWGQGTQVTVSS

SEQ ID NO: 2060 - protein, 124 aa, Artificial
  Nanobody sequence
EVQLVESGGGLVQAGGSLSLSCAASGLTFSTYGMGWFRQAPGKEREFVAFISVSGIRTYYADSVKGRFTISRDNAKNTVYLQMNSLKPEDTAVYYCAAALTGWIEARAEKYNYWGQGTQVTVSS

SEQ ID NO: 2061 - protein, 130 aa, Artificial
  Nanobody sequence
EVQLVESGGGLVQAGGSLRLSCAASGFTLDDYAIGWFRQAPGKEREGVSCISSSDGSTYYADSVKGRFTISRDNAKNTVYLQMNSLKPEDTAVYYCAADLLRHRMSGWGPYWFLYEYDYWGQGTQVTVSS

SEQ ID NO: 2062 - protein, 126 aa, Artificial
  Nanobody sequence
KVQLVESGGGLVQVGGSLRLSCAASERTFDSYAMAWFRQAPGKEREFAAAISWIASVIEYSDSVKGRFTISRDDAKNTVYLEINNLKPEDTATYYCARRRMPYYHISRRTDEYDFWGRGTQVTVSS

SEQ ID NO: 2063 - protein, 122 aa, Artificial
  Nanobody sequence
EVQLVESGGGLVQAGGSLRLSCAASGRTFSNYPMGWFRQAPGNEREFVAAISSSGLNTDYTDSVKGRFTISRDNAANTVYLQMNSLKPEDTAVYYCARSSSGWMRARDFTSWGRGTQVTVSS

SEQ ID NO: 2064 - protein, 132 aa, Artificial
  Nanobody sequence
EVQLVESGGGLVQAGGSLRLSCAASGFTLDDYAKGWFRQAPGKEREGVSCISSSDGSTYYADSVKGRFTISSDNAKNTVYLQMNSLKPEDTAVYYCAALPLPHCPPPPSLYYSGSFYPDDYWGQGTQVTVSS

SEQ ID NO: 2065 - protein, 111 aa, Artificial
  Nanobody sequence
EVQLVESGGGLVQAGGSLSLSCEASGRIFNLNGMGWYRQAQGKQRELVARILSSISTYYTDSVKGRFTISRDNARNTVYLQMDSLKPEDTAVYYCNFGDYWGQGTQVTVSS

SEQ ID NO: 2066 - protein, 123 aa, Artificial
  Nanobody sequence
EVQLVESGGGLVQAGGSLRLSCAASGFTLDDYAIGWFRQAPGKEREGVSCISSSIGSTYYADSVKGRFTISSDNAKNTVYLEMNSLKPEDTAVYYCAYLRWGCSLYLTDYDYWGQGTQVTVSS

SEQ ID NO: 2067 - protein, 129 aa, Artificial
  Nanobody sequence
EVQLVESGGGLVQAGGSLRLSCAASGFTLDDYAIGWFRQALGKEREGVSCISSSDGFTYYADSVKGRFTISSDNAKNTVYLQMNNLKPEDTADYYCAPFSATCNGDSSWWSVSRYFGSWGPGTQVTVSS

SEQ ID NO: 2068 - protein, 123 aa, Artificial
  Nanobody sequence
EVQLVESGGGLVQAGGSLRLSCAASGRTFSDYAMGWFRQAPGKERECVGAISKSGGSTIYADSVKGRFTISRDNAKNTLYLQMNSLKPEDSAVYYCAADRRHGDVVAARASSWGQGTQVTVSS

SEQ ID NO: 2069 - protein, 129 aa, Artificial
  Nanobody sequence
EVQLVESGGGLVPAGDSLRLACAASERSFSSYNTGWFRQAPGKEREFVAATSGSTFSTYYTDSVKGRFTISRDNAKNTVYLQMDNLKPEDTAVYYCAASTSGNAWFTVYYSTLGEYDYWGQGTQVTVSS

SEQ ID NO: 2070 - protein, 123 aa, Artificial
  Nanobody sequence
EVQLVESGGGLVQAGGSLRLSCAASGFTLDDYAIGWFRQAPGKEREGISCISSTDSSTYYVDSVKGRFTISSDNAKNTVYLQMNSLKPEDTAVYYCAALRFGCSYYYTEYDYWGQGTQVTVSS

SEQ ID NO: 2071 - protein, 123 aa, Artificial
  Nanobody sequence
EVQLVESGGGLVQPGGSLRLSCAASGFTLDDYAIGWFRQAPGKEREGVSFISSSGGSTYYADSVKGRFTISRDNAKNTVYLQMNSLKPEDTAVYYCAADRRAGDLVRYEYDYRGQGTQVTVSS

SEQ ID NO: 2072 - protein, 130 aa, Artificial
  Nanobody sequence
  misc_feature (91)..(91): Unknown amino acid, most likely one of the Camelid amino acid residues mentioned for this specific position in Tables A-5 to A-8.
  misc_feature (92)..(92): Unknown amino acid, most likely one of the Camelid amino acid residues mentioned for this specific position in Tables A-5 to A-8.
  misc_feature (105)..(105): Xaa can be any naturally occurring amino acid
  misc_feature (110)..(110): Xaa can be any naturally occurring amino acid
  misc_feature (116)..(116): Xaa can be any naturally occurring amino acid
EVQLVESGGGLVQPGGSLTLSCAASGFSLEHYAVGWFRQAPGKEREGVSCIDMDGSSHYADVVRGRFTISRBBAANTVTLQMTGLKPEDAXXYNCAIEWACTAKXGTSRXDWRQWXYVDWTQGTQVTVSS

SEQ ID NO: 2073 - protein, 122 aa, Artificial
  Nanobody sequence
  misc_feature (52)..(52): Xaa can be any naturally occurring amino acid
EVQLVESGGGLVQAGGSLRLSCAASGFTLDDYAIGWFRQAPGKEREGVSCIXSSDGSTYYADSVKGRFTMSSDNAKNTVYLQMNSLKPEDTAVYYCADCDTVDGIWYQEGSRGQGTQVTVSS

SEQ ID NO: 2074 - protein, 132 aa, Artificial
  Nanobody sequence
  misc_feature (92)..(92): Unknown amino acid, most likely one of the Camelid amino acid residues mentioned for this specific position in Tables A-5 to A-8.
EVQLVESGGGLVQPGGSLRLSCAASGFTLDYYAFGWFRQAPGKEREGVSCISMVNDSTYYADSVKGRFTISRDNAKNTVYLQMNSLKPEDTXVYYCAAQPTYCETLLRVGEWPGGIIPYDYWGQGTQVTVSS

SEQ ID NO: 2075 - protein, 132 aa, Artificial
  Nanobody sequence
  misc_feature (127)..(127): Unknown amino acid, most likely one of the Camelid amino acid residues mentioned for this specific position in Tables A-5 to A-8.
EVQLVESGGGLVQPGGSLRLSCAASGFTLDEHTIGWFRQAPGKEREGVSCISSSDGSTYYADSVKGRFTISRDNAKNTVYLQMNSLKPEDTAAYYCAATMYNGVVATAQFMGDMSADWYNYWGQGTXVTVSS

SEQ ID NO: 2076 - protein, 127 aa, Artificial
  Nanobody sequence
  misc_feature (19)..(19): Unknown amino acid, most likely one of the Camelid amino acid residues mentioned for this specific position in Tables A-5 to A-8.
EVQLVESGGGLVQAGGSLXLSCAVSGFTLDDYAIGWFRQAPGKEREGVSYISSSDGSTYYADSVKGRFTISSDNAKNTVYLQMNSLKPEDTAVYYCAAITWDTVVRTAPFEYEPDYWGQGTQVTVSS

SEQ ID NO: 2077 - protein, 118 aa, Artificial
  Nanobody sequence
EVQLVESGGGLVQAGGSLRLSCAVSGIAFRYNSVAWSRQAPGSQRELVARITNSARTNYADSVKGRFTISRDNDKNMVYLQMNSLKPEDTAVYYCGAGRSMTGDVAYWGQGTQVTVSS

SEQ ID NO: 2078 - protein, 124 aa, Artificial
  Nanobody sequence
EVQLVESGGGLVQAGGSLRLSCAASGITFDDDYAIGWFRQAPGKEREGVSLISSSDGSTYYADSVKGRFTITSDNAKNTVYLQMNSLKPEDTAVYYCAADPTSGLPSDDEYDYWGQGTQVTVSS

SEQ ID NO: 2079 - protein, 118 aa, Artificial
  Nanobody sequence
EVQLVESGGGLVQAGGSLRLSCAASGIAFRYNSVAWSRQAPGSQREVVAGITNSARTNYADSVKGRFTISRDNDKKMVYLQMNSLKPEDTAVYYCGAGRSMAGDVAYWGQGTQVTVSS

SEQ ID NO: 2080 - protein, 118 aa, Artificial
  Nanobody sequence
EVQLVESGGGLVQAGGSLRLSCAASGIAFRYNSVAWSRQAPGSQRELVASISNSARTKYADSVKGRFTISRDNEKKMLYLQMDSLKPEDTAVYYCGAGRSMAGDVAYWGQGTQVTVSS

SEQ ID NO: 2081 - protein, 117 aa, Artificial
  Nanobody sequence
EVQLVESGGGLVQPGGSLRLSCVASGRPLTGSTMAWFRQAPGKECEFVARISGSGTINYADSLRGRFTISRDVPKNTVWLQMDSLKPDDTAVYYCAAVKVAGSYEYWGQGTQVTVSS

SEQ ID NO: 2082 - protein, 123 aa, Artificial
  Nanobody sequence
EVQLVESGGGSVQTGGSLTLSCTASGRTGSTDGVGWFRQAPGKEREFVSAIKWIGGSKYYSNSAEGRFTIAVDNAKNTVYLQMNSLNPEDTAVYYCAAGAIMFPSRPRDFDFWGQGTQVTVSS

SEQ ID NO: 2083 - protein, 123 aa, Artificial
  Nanobody sequence
EVQLVESGGGLVQAGGSLRLSCAASGRTFSSYAMGWFRQAPGKEREFVAHINWNGGNTYYADSVRGRFIISRDNAKNTLYLQMNRLKPEDTAVYYCAARPDRVIVKWDEYDYWGQGTQVTVSS

SEQ ID NO: 2084 - protein, 117 aa, Artificial
  Nanobody sequence
EVQLVESGGGLVQPGESLTLSCAASGFTFSSYWMYWVRQAPGRELEWVARIQPGSSYTAYADSVKGRFTISRDLAKNTLYLQMNRLKSDDTAVYYCAKDWEMAAPSLGQGTQVTVSS

SEQ ID NO: 2085 - protein, 120 aa, Artificial
  Nanobody sequence
EVQLVESGGGLVQAGGSLRLSCAASGTFLSINRMGWYRQAPGKERELVAVIISGGSTNYADSVKGRFTISRENAELTVYLQMNSLKPEDTAVYYCNVWINTDGIYTYEYWGQGTQVTVSS

SEQ ID NO: 2086 - protein, 113 aa, Artificial
  Nanobody sequence
EVQLVESGGGSVQPGGSLRLSCAASGLIVGRPAMGWYRQAPGKQRELVAIIGSGGNTNYPESVKGRFTIARENANNTVYLQMNSLKPEDTAVYHCNLHGTRFWGQGTQVTVSS

SEQ ID NO: 2087 - protein, 122 aa, Artificial
  Nanobody sequence
EVQLVESGGGLVQAGGSLRLSCAASGLTFSSPAMAWFRQVPGKEREFVATIRRSSAWTDYADSVKGRFTISRDRPTNTAYLQMSSLKPEDTAVYYCAADKISRGIDPNWTYWGRGTQVTVSS

SEQ ID NO: 2088 - protein, 111 aa, Artificial
  Nanobody sequence
EVQLVESGGGLVQPGGSLRLSCAVSGISVRSSVVNWYRQAPGKQRELVALIMGGAIRKYADDVKGRFTISSDSAKNTVYLQMNSLRPEDTAVYYCSALEYWGQGTQVTVSS

SEQ ID NO: 2089 - protein, 111 aa, Artificial
  Nanobody sequence
EVQLVESGGGLVQPGGSLRLSCAVSGISVRSSVVNWYRQAPGKQRELVALIMGGAITKYADDVKGRFTISSDSARNTVYLQMNSLRPEDTAVYSCSALEYWGQGTQVTVSS

SEQ ID NO: 2090 - protein, 125 aa, Artificial
  Nanobody sequence
EVQLVESGGGLAQEGGSLRLSCAASGRPLTTYGMAWFRQAPGKEREFVARIGAEPGATVYGDSVKGRFTISRDNAKNTVYLQMNTLKPEDTAVYYCAADAPPFGPYYRESVYDYWGQGTQVTVSS

SEQ ID NO: 2091 - protein, 121 aa, Artificial
  Nanobody sequence
EVQLVESGGGLVTAGGSLRLSCAASGFRFSVYDMGWFRQAPGKEREFVAVIVGSRTTDYADSVKGRFIIFRDNAKNTLYLQMNGLKPDDTAVYYCARRVGTYETVLGYDKWGQGTQVTVSS

SEQ ID NO: 2092 - protein, 134 aa, Artificial
  Nanobody sequence
EVQLVESGGGLVQAGGSLRLSCAASGFTFDDYAIGWFRQAPGKEREGVSCISSSDGSTYYADSVKGRFTISSDNAKNTVYLQMNSLKPEDTAVYYCAAPLLRGGCPITYYSGSYPHVYHAMDYWGKGTLVTVSS

SEQ ID NO: 2093 - protein, 117 aa, Artificial
  Nanobody sequence
EVQLVESGGGLVQPGGSLRLSCAASGFTFSRAWMYWVRQAPGETLEWVSRIQPGGGSTSYADSVKGRFTISRDNAKNTLYLQMNSLKSEDTAVYYCAKDWEMAAPSLGQGTLVTVSS

SEQ ID NO: 2094 - protein, 115 aa, Artificial
  Nanobody sequence
EVQLVESGGGLVQPGGSLRLSCKASRSIFSINTMDWHRQVPGKQRELVAAIVNGVWKNYADSVKGRFTISRDNAENTVYLQMNNLKPEDTAVYYCHAKRGVSDYWGQGTQVTVSS

SEQ ID NO: 2095 - protein, 125 aa, Artificial
  Nanobody sequence
  misc_feature (3)..(3): Unknown amino acid, most likely one of the Camelid amino acid residues mentioned for this specific position in Tables A-5 to A-8.
EVXLVESGGGLVETGGSLRLSCAARGRIKSIADMGWYRQAPGKQRELVATITFGGTTTYADSAKGRFTISRDNAENTVYLQMNSLKPEDTAVYFCNADRILYVSEGLYRTEVDSWGQGTQVTVSS

SEQ ID NO: 2096 - protein, 117 aa, Artificial
  Nanobody sequence
EVQLVESGGGLVQPGGSLRLSCAASGFTFSRAWMYWVRQAPGETLEWVSRIQPGGGSTSYADSVKGRFTISRDNAKNTLYLQMNSLKSEDTAVYYCAKDWEMAAPSLGQGTQVTVSS

SEQ ID NO: 2097 - protein, 123 aa, Artificial
  Nanobody sequence
EVQLMESGGGVVQVGGSLRLSCAASGGTLYSYIVGWFSQAPGQDREFVGAIEYSGGITDYKDSVKGRFTISKDNPKNTVFLQMDSLKPEDTAVYYCGLTRVVGARNPGDYAYWGQGTQVTVSS

SEQ ID NO: 2098 - protein, 127 aa, Artificial
  Nanobody sequence
EVQLVESGGGLAQTGGSLTLSCAASGRTPSIVAMGWFRQIPGKDREPVGEIILSKGFTYYADSVKGRFTISRANAKNTITMSLQMHSLKSEDTAVYYCAARQNWSGNPTRPNEYEYWGQGTQVTVSS

SEQ ID NO: 2099 - protein, 127 aa, Artificial
  Nanobody sequence
EVQLVESGGGLVQTGGSLRLSCAASGRTSRLVAMGWFRQTPGKEREFVGEIILSKDFTYYADSVKGRFTISRANAKNTITMYLQMSSLKSEDTAVYYCAARQNWSGHPARTNEYEYWGQGTQVTVSS

SEQ ID NO: 2100 - protein, 127 aa, Artificial
  Nanobody sequence
EVQLVESGGGLVQTGGSLRLSCAASGRTPSIVAMGWFRQTPGKEREFVGEIILSKGFTYYADSVKGRFTISRANAKNTITMYLQMHSLKSEDSAVYYCAARQNWSGGPTRTNEYEYWGQGTQVTVSS

SEQ ID NO: 2101 - protein, 127 aa, Artificial
  Nanobody sequence
EVQLVESGGGLVQTGGSLRLSCAASGRTPSIVAMGWFRQTPGKERESVGEIILSKGFTYYADSVKGRFTISRANAKNTITMYLQMNSLKSEDTAVYYCAARQNWSGNPTRTNEYEYWGQGTQVTVSS

SEQ ID NO: 2102 - protein, 127 aa, Artificial
  Nanobody sequence
  misc_feature (19)..(19): Unknown amino acid, most likely one of the Camelid amino acid residues mentioned for this specific position in Tables A-5 to A-8.
EVQLVESGGGLVQTGGSLXLSCAASGRTPRLVAMGWFRQTPGKEREFVGEIILSKGFTYYADSVKGRFTISRVNAKNTITMYLQMNSLKSEDTAVYYCAGRQNWSGSPARTNEYEYWGQGTQVTVSS

SEQ ID NO: 2103 - protein, 127 aa, Artificial
  Nanobody sequence
EVQLVESGGGLVQTGGSLRLSCAASGRTPSIIAMGWFRQTPGKEREFVGEIILSKGFTYYADSVKGRFTISRANAKNTITMYLQMNSLKSEDTAVYYCAARQNWSGNPTRTNEYEYWGQGTQVTVSS

SEQ ID NO: 2104 - protein, 124 aa, Artificial
  Nanobody sequence
EVQLVESGGGLVQTGGSLRLSCTHSGRPLSMFAVGWFRQAPGEQRVLVAAISRSGGATYYPDSVKGRFAISRDNAKNTVNLQMNSLTPEDTAVYYCAAALGGVYNAIANDYKYWGQGTQVTVSS

SEQ ID NO: 2105 - protein, 127 aa, Artificial
  Nanobody sequence
EVQLVESGGGSVQAGGSLRLSCAASGRTFSDYAMGWFRQAPGKEREFVAGISRSGSTTGYAGSVKGRFSISRDNAKNAVYLQMNSLKPEDTAVYYCASKRSPYTGIYYSDLSQSEDWGQGTQVTVSS

SEQ ID NO: 2106 - protein, 125 aa, Artificial
  Nanobody sequence
EVQLVESGGGLVQAGGSLRLSCAASGFAFDDYEIGWFRQAPGKEREGVACINNSDGSTYYIDSVKGRFTISKDSATNTVYLQMSSLKPEDTAVYYCAADSWCTVVAGKIHPFDSWGQGTQVTVSS

SEQ ID NO: 2107 - protein, 124 aa, Artificial
  Nanobody sequence
EVQLVESGGGLVQAGGSLRLSCAASGRTSSTYVMGWFRQAPGKEREFVAGISWSAGNTRYADSVKGRFTISRDIAKNTFDLQMNSLKPEDTAVYYCAADRRYGGSLDPSAWDFWGQGTQVTVSS

SEQ ID NO: 2108 - protein, 124 aa, Artificial
  Nanobody sequence
EVQLVESGGGSVQAGGSLRLSCAASGRTFSSYVMGWFRQAPGKEREFVAAVSWSAGNTRYANSVKGRFTISRDIAKNTFYLQMNSLKPEDTAVYYCVADRRYGGSLDPSAWDFWGQGTQVTVSS

SEQ ID NO: 2109 - protein, 125 aa, Artificial
  Nanobody sequence
EVQLVESGGGLVQPGGSLRLSCAVSGFTSDYYVIAWFRQTPGHEREGVSSIRKGDGATYYADSVKGRFSISRDNAKNMVYLQMNSLKPEDTAVYTCAARYDTLLGGGRPREFPYWGQGTQVTVSS

SEQ ID NO: 2110 - protein, 125 aa, Artificial
  Nanobody sequence
EVQLVESGGGLVQPGGSLRLSCAVSGFTSDYYVVAWFRQTPGHEREGVSSIRIGDYATYYADSVKGRFSISRDNAKNMVYLQMNSLKPEDTAVYTCAARYDSHLGGGRPREFPYWGQGTQVTVSS

SEQ ID NO: 2111 - protein, 125 aa, Artificial
  Nanobody sequence
EVQLVESGGGLVQPGGSLRLSCAVSGFTSDYYVIAWFRQTPGHEREGVSSIRITDNATYYADSVKGRFSISRDNAKNMVFLQMNSLKPEDTAVYTCAARYETLLGGGRPREFPYWGQGTQVTVSS

SEQ ID NO: 2112 - protein, 125 aa, Artificial
  Nanobody sequence
EVQLVESGGGLVQPGGSLILSCAVSGFTSDYYVIAWFRQTPGHEREGVSSIRIGDGATYYADSVKGRFSISRDNAKNMVYLQMNSLKPEDTAVYTCAARYDTLLGGGRPREFPYWGQGTQVTVSS

SEQ ID NO: 2113 - protein, 124 aa, Artificial
  Nanobody sequence
EVQLVESGGGLVQPGGSLRLSCAASGFSFSRNWMYWVRQAPGKGLEWVGDISMEGTNTYYRDSVQGRFTISRDNAKNILYLQMNSLKSEDTAVYYCARAKNEGFVPGGYDFDYRGQGTQVTVSS

SEQ ID NO: 2114 - protein, 125 aa, Artificial
  Nanobody sequence
EVQLVESGGGLVQPGGSLRLSCAVSGFTSDYYVIAWFRQTPGHEREGLSSIRIGDSATFYADSVKGRFSISRDNAKNMVYLQMNSLKPEDTAVYTCAGRYDTLLGGGRPREFPYWGQGTQVTVSS

SEQ ID NO: 2115 - protein, 125 aa, Artificial
  Nanobody sequence
EVQLVESGGGLVQPGGSLRLSCAVSGFTSDFYVIAWFRQTPGHEREGVSSIRIGDNAAYYADSVKGRFSISRDYAKNMVYLQMNSLKAEDTAVYTCAGRYDSNLGGGRPREFPYWGRGTQVTVSS

SEQ ID NO: 2116 - protein, 118 aa, Artificial
  Nanobody sequence
EVQLVESGGGLVQPGGSLRLSCAASGRTIAAYKMAWFRQAPDKARERVALITSFGLTVYADSVKGRFTISRDNAYNTVYLQMNHLKFEDTAVYYCAAGQQDSSNYNSWGQGTQVTVSS

SEQ ID NO: 2117 - protein, 125 aa, Artificial
  Nanobody sequence
EVQLVESRGGLVQPGGSLRLSCAVSGFTSDYYVIAWFRQTPGHEREGVSSIRKGDGATYYADSVKGRFSISRDNAKNMVYLQMNSLKPEDTAVYTCAARYDTLLGGGRPREFPYWGQGTQVTVSS

SEQ ID NO: 2118 - protein, 127 aa, Artificial
  Nanobody sequence
EVQLVESGGRLVQAGDSLRLSCAASGRTFTSYRMGWFRQAPGKEREFVSALRWSSGNIDYTYYADSVKGRFSISGDYAKNTVYLQMNSLKAEDTAVYYCAASTRWGVMESDTEYTSWGQGTQVTVSS

SEQ ID NO: 2119 - protein, 126 aa, Artificial
  Nanobody sequence
EVQLVESGGGLVQAGGSLTLSCAASGRTFSSYHMGWFRQAPGKEREYVAAISWSGHMTYYKDSAKGRFTISRDNAKNTVYLQMNNLKPEDTAVYYCAARNRDYWSDFDVPGRYAYWGQGTQVTVSS

SEQ ID NO: 2120 - protein, 127 aa, Artificial
  Nanobody sequence
EVQLVESGGRLVQAGDSLRLSCAASGRTFTNYRVGWFRQAPGKEREFVSALRWSSSNIDYTYYADSVKGRFSISGDYAKNTVYLQMNSLKAEDTAVYYCAASTSWGVLESDTEYTSWGQGTQVTVSS

SEQ ID NO: 2121 - protein, 125 aa, Artificial
  Nanobody sequence
  misc_feature (123)..(123): Unknown amino acid, most likely one of the Camelid amino acid residues mentioned for this specific position in Tables A-5 to A-8.
  misc_feature (125)..(125): Unknown amino acid, most likely one of the Camelid amino acid residues mentioned for this specific position in Tables A-5 to A-8.
EVQLVESGGGLVQPGGSLRLSCAVSGFTSEYYVIAWFRQTPGHEREGVSSIRIRDNAAYYADSVKGRFSISRDNHKNMVYLQMNSLKPEDTAVYTCAGRYDTLLGGGRPREFPYWGQGTQVTXSX

SEQ ID NO: 2122 - protein, 122 aa, Artificial
  Nanobody sequence
  misc_feature (3)..(3): Unknown amino acid, most likely one of the Camelid amino acid residues mentioned for this specific position in Tables A-5 to A-8.
EVXLVESGGALVQDGGSLRLSCAASGLTLSNYVAAWFRQAPGKEREYVGSIRWSSEQTYYANSVKGRFSISRDNAKNAVYLEMNTLKPEDTAVYYCALGTSFSALPKLYNYWGQGTQVTVSS

SEQ ID NO: 2123 - protein, 127 aa, Artificial
  Nanobody sequence
  misc_feature (3)..(3): Unknown amino acid, most likely one of the Camelid amino acid residues mentioned for this specific position in Tables A-5 to A-8.
EVXLVESGGRLVQAGDSLRLSCAASGRTFISYRMGWFRQAPGKEREFVAALRWSSSNIDYTYYADSVKGRFSISGDYAKNTVYLQMNSLKAEDTAVYYCAASTRWGVMESDTEYTSWGQGTQVTVSS

SEQ ID NO: 2124 - protein, 121 aa, Artificial
  Nanobody sequence
  misc_feature (98)..(98): Unknown amino acid, most likely one of the Camelid amino acid residues mentioned for this specific position in Tables A-5 to A-8.
  misc_feature (108)..(108): Xaa can be any naturally occurring amino acid
EVQLVESGGGLVQSGGSLRLSCAASEGTFTIYPLGWFRQAPGKDRKFVAALPWSAGIPQYSDSVKGRFTISRDNAKNTVYLQMNNLKPEDTAVYYCAXKGRDDSYQPXNYWGQGTQVTVSS

SEQ ID NO: 2125 - protein, 125 aa, Artificial
  Nanobody sequence
EVQLVESGGGSAQAGGSLRLSCAASGGTFSSYTMAWFRQAPEKEHEFVAVISGTGDSAYYADSAKGRFTISRDNAKHTVYLQMNVLKPEDTALYYCAGPCMVLGERCILMPHNYWGQGTQVTVSS

SEQ ID NO: 2126 - protein, 131 aa, Artificial
  Nanobody sequence
EVQLVESGGGLVQAGGSLKLSCAASGRSFSRYAMGWFRQAPGKEREFVAATRWNGGSTYYVDYADSVKGRFTVSRDNVKNTMYLQMNSLKPEDTAGYYCAGKGTVYSGSRPISDEYDYDYWGQGTQVTVSS

SEQ ID NO: 2127 - protein, 116 aa, Artificial
  Nanobody sequence
EVPLVESGGGLVQSGGSLRLSCAASGSFDSDTVMAWYRQAPGKQRDFVAAVTGTGGTNYADSVKGRFSISRDNAKNTVYLQMNSLKPEDMGVYYCYMRILGGGRYWGQGTQVTVSS

SEQ ID NO: 2128 - protein, 124 aa, Artificial
  Nanobody sequence
EVQLVESGGGLVQAGGSLRLSCAASERTVSTYTSGWFRQAPGKERDLVAAIRWSDDFTYYADSVKGRFTISRDNAKNTVYLQMNSLKVEDTAVYYCAGHSFSALIPPVSFWPSWGQGTQVTVSS

SEQ ID NO: 2129 - protein, 120 aa, Artificial
  Nanobody sequence
EVQLVESGGGLVQAGGSLRLSCAASGTIFRIENMYWFRQAPGNQREWVARISRESGTSYADSVKDRFTISRDNAKNTVYLQMNSLKPGDTAVYYCTADVQTNSRGAQQIFRGQGTQVTVS

SEQ ID NO: 2130 - protein, 121 aa, Artificial
  Nanobody sequence
EVQLVESGGGLVQAGGSLRLSCAASGSIFRINNMYWFRQAHENQREWVARITRESDTTYADSVKDRFTISRDNAKNTVYLQMNSLKPGDTAVYYCTADVQTNSRDAQQIFRGQGTRVTVSS

SEQ ID NO: 2131 - protein, 128 aa, Artificial
  Nanobody sequence
EVQLVESGGALVQPGESLRLSCVVSGDTSTYHAIGWFRQAPGKGREGVSCINRSDGTTAYADSVKGRFTISRDKAKNTVYLQMNALRPEDTAVYSCAADPMLYCDTDYEPQTTDFTSWGRGTQVTVSS

SEQ ID NO: 2132 - protein, 126 aa, Artificial
  Nanobody sequence
EVQLVESGGGSVQVGASLRLSCAARGRALSNYGVGWFRQAPGKEREFVASVSWNGGNKNYRSSVKGRFTISRDNANDTVFLQMNSLKPEDTAVYYCSADVRPYGLGPRSDERVADWGQGTQVTVSS

SEQ ID NO: 2133 - protein, 113 aa, Artificial
  Nanobody sequence
EVQLVESGGGLVQAGGSLRVSCLASGNIVSRNVMAWYRQAPGKQRELVASVDTGGSTLYADSVKGRFTISRDSAKSMVYLQMNSLKPEDTAVYYCNVPRYGYWGQGTQVTVSS

SEQ ID NO: 2134 - protein, 121 aa, Artificial
  Nanobody sequence
EVQLVESGGGLVQSGGSLRLSCAASEGTFTIYPLGWFRQAPGKDRKFVAALPWSAGIPQYSDSVKGRFTISRDNAKNTVYLQMNNLKPEDTAVYYCAAKGRDDSYQPWNYWGQGTQVTVSS

SEQ ID NO: 2135 - protein, 119 aa, Artificial
  Nanobody sequence
EVQLVESGGGLVQPGGSLTLSCVASGRTFSTDVMGWFRQAPGKEREFVAAHRTSGISTVYAASVKGRFTISRDNAKNTVYLGMKSLKPEDTAVYVCAAGSDASGGYDYWGQGTQVTVSS

SEQ ID NO: 2136 - protein, 119 aa, Artificial
  Nanobody sequence
EVQLVESGGGLVQPGGSLTLSCVASGRTFSTDVMGWFRQAPGKEREFVAAHRRNGISTVYAASVKGRFTISRDNAKNTVYLGMKSLKPEDTAVYVCAAGSDASGGYDYWGQGTQVTVSS

SEQ ID NO: 2137 - protein, 125 aa, Artificial
  Nanobody sequence
EVQLVESGGGLVQAGGSLRLSCAASGRTFSSYAMGWFRQAPGKDREFVAAISWIGESTYYADSVKGRFTISRDNAKNTVYLRMNSLKPEDTAVYYCAADLYYTAYVAAADEYDYWGQGTQVTVSS

SEQ ID NO: 2138 - protein, 131 aa, Artificial
  Nanobody sequence
EVQLVESGGGLVQAGGSLKLSCAASGRSFSRYAMGWFRQAPGKEREFVAATRWNGGSTYYADYADSVKGRFTVSRDNAKNTMYLQMNSLKPEDTAVYYCAGKGTVYSGSSPISDEYGYDYWGQGTQVTVSS

SEQ ID NO: 2139 - protein, 124 aa, Artificial
  Nanobody sequence
EVQLVESGGGLMQAGDSLRLSCAASGRTSYIYTMAWFRQAPGKEREFVAAIRWSDTTTYYADSVKGRFTASRDNAKNTMYLQMNSLKPMDTAVYYCAVKRDSSTYYRVRNYDYWGQGTQVTVSS

SEQ ID NO: 2140 - protein, 127 aa, Artificial
  Nanobody sequence
EVQLVESGGGLVQAGGSLRLSCAAAERTFSDYAVGWFRQAPGKEREFVSAVSRFGTITNYADSVQGRFTISRDNAKNTVYLQMTGLKFEDTAVYYCAAARTVYVGHLYYIDNEYAYWGQGTQVTVSS

SEQ ID NO: 2141 - protein, 121 aa, Artificial; identical to SEQ ID NO: 2124
  Nanobody sequence
  misc_feature (98)..(98): Unknown amino acid, most likely one of the Camelid amino acid residues mentioned for this specific position in Tables A-5 to A-8.
  misc_feature (108)..(108): Xaa can be any naturally occurring amino acid

SEQ ID NO: 2142 - protein, 294 aa, Artificial
  Nanobody construct
EVQLVESGGGLVQAGGSLRLSCAASGSIFNFNYMGWFRQAPGKEREFVAAIRWSGSSTYYADSVKGRFTISRDDAKNTVALQMNSLKPEDTAIYYCALRKGIPYSTSDRVIKGVNDYDYWGQGTQVTVSSGGGGSGGGGSGGGGSGGGGSGGGGSGGGGSGGGGSEVQLVESGGGLVQAGGSLTLSCAVSGLTFNNYAMGWFRQVPGKEREFVAAISRSGLRTFYSDSVKGRFTISRDSAKSTVYVQMNNLKPEDTAVYFCAADRRTYYSEGPSLTDTLRYDYWGQGTQVTVSS

SEQ ID NO: 2143 - protein, 293 aa, Artificial
  Nanobody construct
EVQLVESGGGLVQAGGSLRLSCAASGSIFNFNYMGWFRQAPGKEREFVAAIRWSGSSTYYADSVKGRFTISRDDAKNTVALQMNSLKPEDTAIYYCALRKGIPYSTSDRVIKGVNDYDYWGQGTQVTVSSGGGGSGGGGSGGGGSGGGGSGGGGSGGGGSGGGGSEVQLVESGGGLVQAGGSLRLSCAASGRTSSSYSMGWFRQAPGKEREFVAYISGGGLTIYYAHSVKGRFTISRDNAKNTVYLQMNSLNSADTAVYSCAAPKRDLYLGSRYPVPESYDYWGQGTQVTVSS

SEQ ID NO: 2144 - protein, 292 aa, Artificial
  Nanobody construct
EVQLVESGGGLVQAGGSLRLSCAASGSIFNFNYMGWFRQAPGKEREFVAAIRWSGSSTYYADSVKGRFTISRDDAKNTVALQMNSLKPEDTAIYYCALRKGIPYSTSDRVIKGVNDYDYWGQGTQVTVSSGGGGSGGGGSGGGGSGGGGSGGGGSGGGGSGGGGSEVQLVESGGGLVQAGGSLRLSCAAPGRTFSEYAMGWFRQNPGNEREFVAAISRGGGFTDYADSVKGRFTISRDNAKNTVYLQMNSLKPEDTAVYYCAADGRSSFGIAKRSRYEYDSWGQGTQVTVSS

SEQ ID NO: 2145 - protein, 293 aa, Artificial
  Nanobody construct
EVQLVESGGGLVQAGGSLRLSCAASGSIFNFNYMGWFRQAPGKEREFVAAIRWSGSSTYYADSVKGRFTISRDDAKNTVALQMNSLKPEDTAIYYCALRKGIPYSTSDRVIKGVNDYDYWGQGTQVTVSSGGGGSGGGGSGGGGSGGGGSGGGGSGGGGSGGGGSEVQLVESGGGLVQPGGSLRLSCIASGLPFSTKSMGWFRQAPGKEREFVARISPGGTSRYYGDFVKGRFAISRDNAKNTTWLQMNSLKAEDTAVYYCASGERSTYIGSNYYRTNEYDYWGTGTQVTVSS

SEQ ID NO: 2146 - protein, 293 aa, Artificial
  Nanobody construct
EVQLVESGGGLVQAGGSLRLSCAASGSIFNFNYMGWFRQAPGKEREFVAAIRWSGSSTYYADSVKGRFTISRDDAKNTVALQMNSLKPEDTAIYYCALRKGIPYSTSDRVIKGVNDYDYWGQGTQVTVSSGGGGSGGGGSGGGGSGGGGSGGGGSGGGGSGGGGSEVQLVESGGGLVQAGGSLRLSCAASGRTLSSYAMGWFRQAPGKEREFVARISQGGTAIYYADSVKGRFTISRDNAKNTVYLQMNSLKPEDTAVYYCAKDPSPYYRGSAYLLSGSYDSWGQGTQVTVSS

SEQ ID NO: 2147 - protein, 289 aa, Artificial
  Nanobody construct
EVQLVESGGGLVQAGGSLRLSCAASGSIFNFNYMGWFRQAPGKEREFVAAIRWSGSSTYYADSVKGRFTISRDDAKNTVALQMNSLKPEDTAIYYCALRKGIPYSTSDRVIKGVNDYDYWGQGTQVTVSSGGGGSGGGGSGGGGSGGGGSGGGGSGGGGSGGGGSEVQLVESGGGLVQPGGSLRLSCAASGFTFSNYWMYWVRQAPGKGLERVAPLNPGGTITLYADFVKSRFTISRDNAKNTVYLQMNSLKPEDTAVYVCAAPSGTLYTRNKSGYIYWGQGTQVTVSS

SEQ ID NO: 2148 - protein, 290 aa, Artificial
  Nanobody construct
EVQLVESGGGLVQAGGSLRLSCAASGSIFNFNYMGWFRQAPGKEREFVAAIRWSGSSTYYADSVKGRFTISRDDAKNTVALQMNSLKPEDTAIYYCALRKGIPYSTSDRVIKGVNDYDYWGQGTQVTVSSGGGGSGGGGSGGGGSGGGGSGGGGSGGGGSGGGGSEVQLVESGGGLVQPGGSLRLSCAASGFYLDDYAIAWFRQAPGKEREGVSGIDSGDGSTYYADSVKGRFTISSDNAKNTVYLQMNSLRPEDTAVYYCARVRTGWGLNAPDYAMDYWGKGTLVTVSS

SEQ ID NO: 2149 - protein, 290 aa, Artificial
  Nanobody construct
EVQLVESGGGLVQAGGSLRLSCAASGSIFNFNYMGWFRQAPGKEREFVAAIRWSGSSTYYADSVKGRFTISRDDAKNTVALQMNSLKPEDTAIYYCALRKGIPYSTSDRVIKGVNDYDYWGQGTQVTVSSGGGGSGGGGSGGGGSGGGGSGGGGSGGGGSGGGGSEVQLVESGGGLVQPGGSLRLSCAASGFTLDDYAIAWFRQAPGKEREGVSGIDSGDGSAYYADSVKGRFTISSDNAKNTVYLQMNSLRPEDTAVYYCARVRTGWGLNAPDYAMDYWGKGTLVTVSS

SEQ ID NO: 2150 - protein, 295 aa, Artificial
  Nanobody construct
EVQLVESGGGLVQAGGSLRLSCAASGSIFNFNYMGWFRQAPGKEREFVAAIRWSGSSTYYADSVKGRFTISRDDAKNTVALQMNSLKPEDTAIYYCALRKGIPYSTSDRVIKGVNDYDYWGQGTQVTVSSGGGGSGGGGSGGGGSGGGGSGGGGSGGGGSGGGGSEVQLVESGGGLVQAGGSLTLSCAASVRTFSTSAMGWFRQAPGKEREFVAAINWNAGSTYHADSVKGRFTISGDNAKNSVFLQMNGLKPEDTAVYYCAAQASGRVTYFDYAYRRGSNYDYWGQGTQVTVSS

SEQ ID NO: 2151 - protein, 287 aa, Artificial
  Nanobody construct
EVQLVESGGGLVQAGGSLRLSCAASGRIFSLPASGNIFNLLTIAWHRQAPGMQRELVATINSGSRTNYADSVKGRFTISRDNAQKTVYLQMNNLKPEDTAVYYCQTSGSGSPNFWGQGTQVTVSSGGGGSGGGGSGGGGSGGGGSGGGGSGGGGSGGGGSEVQLVESGGGLVQAGGSLRLSCAAPGRTFSEYAMGWFRQNPGNEREFVAAISRGGGFTDYADSVKGRFTISRDNAKNTVYLQMNSLKPEDTAVYYCAADGRSSFGIAKRSRYEYDSWGQGTQVTVSS

SEQ ID NO: 2152 - protein, 290 aa, Artificial
  Nanobody construct
EVQLVESGGGLVQAGGSLRLSCAASGRIFSLPASGNIFNLLTIAWHRQAPGMQRELVATINSGSRTNYADSVKGRFTISRDNAQKTVYLQMNNLKPEDTAVYYCQTSGSGSPNFWGQGTQVTVSSGGGGSGGGGSGGGGSGGGGSGGGGSGGGGSGGGGSEVQLVESGGGLVQAGGSLTLSCAASVRTFSTSAMGWFRQAPGKEREFVAAINWNAGSTYHADSVKGRFTISGDNAKNSVFLQMNGLKPEDTAVYYCAAQASGRVTYFDYAYRRGSNYDYWGQGTQVTVSS

SEQ ID NO: 2153 - protein, 289 aa, Artificial
  Nanobody construct
EVQLVESGGGLVQAGGSLRLSCAASGRIFSLPASGNIFNLLTIAWHRQAPGMQRELVATINSGSRTNYADSVKGRFTISRDNAQKTVYLQMNNLKPEDTAVYYCQTSGSGSPNFWGQGTQVTVSSGGGGSGGGGSGGGGSGGGGSGGGGSGGGGSGGGGSEVQLVESGGGLVQAGGSLTLSCAVSGLTFNNYAMGWFRQVPGKEREFVAAISRSGLRTFYSDSVKGRFTISRDSAKSTVYVQMNNLKPEDTAVYFCAADRRTYYSEGPSLTDTLRYDYWGQGTQVTVSS

SEQ ID NO: 2154 - protein, 288 aa, Artificial
  Nanobody construct
EVQLVESGGGLVQAGGSLRLSCAASGRIFSLPASGNIFNLLTIAWHRQAPGMQRELVATINSGSRTNYADSVKGRFTISRDNAQKTVYLQMNNLKPEDTAVYYCQTSGSGSPNFWGQGTQVTVSSGGGGSGGGGSGGGGSGGGGSGGGGSGGGGSGGGGSEVQLVESGGGLVQAGGSLRLSCAASGRTSSSYSMGWFRQAPGKEREFVAYISGGGLTIYYAHSVKGRFTISRDNAKNTVYLQMNSLNSADTAVYSCAAPKRDLYLGSRYPVPESYDYWGQGTQVTVSS

SEQ ID NO: 2155 - protein, 285 aa, Artificial
  Nanobody construct
EVQLVESGGGLVQAGGSLRLSCAASGRIFSLPASGNIFNLLTIAWHRQAPGMQRELVATINSGSRTNYADSVKGRFTISRDNAQKTVYLQMNNLKPEDTAVYYCQTSGSGSPNFWGQGTQVTVSSGGGGSGGGGSGGGGSGGGGSGGGGSGGGGSGGGGSEVQLVESGGGLVQPGGSLRLSCAASGFYLDDYAIAWFRQAPGKEREGVSGIDSGDGSTYYADSVKGRFTISSDNAKNTVYLQMNSLRPEDTAVYYCARVRTGWGLNAPDYAMDYWGKGTLVTVSS

SEQ ID NO: 2156 - protein, 284 aa, Artificial
  Nanobody construct
EVQLVESGGGLVQAGGSLRLSCAASGRIFSLPASGNIFNLLTIAWHRQAPGMQRELVATINSGSRTNYADSVKGRFTISRDNAQKTVYLQMNNLKPEDTAVYYCQTSGSGSPNFWGQGTQVTVSSGGGGSGGGGSGGGGSGGGGSGGGGSGGGGSGGGGSEVQLVESGGGLVQPGGSLRLSCAASGFTFSNYWMYWVRQAPGKGLERVAPLNPGGTITLYADFVKSRFTISRDNAKNTVYLQMNSLKPEDTAVYVCAAPSGTLYTRNKSGYIYWGQGTQVTVSS

SEQ ID NO: 2157 - protein, 288 aa, Artificial
  Nanobody construct
EVQLVESGGGLVQAGGSLRLSCAASGRIFSLPASGNIFNLLTIAWHRQAPGMQRELVATINSGSRTNYADSVKGRFTISRDNAQKTVYLQMNNLKPEDTAVYYCQTSGSGSPNFWGQGTQVTVSSGGGGSGGGGSGGGGSGGGGSGGGGSGGGGSGGGGSEVQLVESGGGLVQAGGSLRLSCAASGRTLSSYAMGWFRQAPGKEREFVARISQGGTAIYYADSVKGRFTISRDNAKNTVYLQMNSLKPEDTAVYYCAKDPSPYYRGSAYLLSGSYDSWGQGTQVTVSS

SEQ ID NO: 2158 - protein, 288 aa, Artificial
  Nanobody construct
EVQLVESGGGLVQAGGSLRLSCAASGRIFSLPASGNIFNLLTIAWHRQAPGMQRELVATINSGSRTNYADSVKGRFTISRDNAQKTVYLQMNNLKPEDTAVYYCQTSGSGSPNFWGQGTQVTVSSGGGGSGGGGSGGGGSGGGGSGGGGSGGGGSGGGGSEVQLVESGGGLVQPGGSLRLSCIASGLPFSTKSMGWFRQAPGKEREFVARISPGGTSRYYGDFVKGRFAISRDNAKNTTWLQMNSLKAEDTAVYYCASGERSTYIGSNYYRTNEYDYWGTGTQVTVSS

SEQ ID NO: 2159 - protein, 285 aa, Artificial
  Nanobody construct
EVQLVESGGGLVQAGGSLRLSCAASGRIFSLPASGNIFNLLTIAWHRQAPGMQRELVATINSGSRTNYADSVKGRFTISRDNAQKTVYLQMNNLKPEDTAVYYCQTSGSGSPNFWGQGTQVTVSSGGGGSGGGGSGGGGSGGGGSGGGGSGGGGSGGGGSEVQLVESGGGLVQPGGSLRLSCAASGFTLDDYAIAWFRQAPGKEREGVSGIDSGDGSAYYADSVKGRFTISSDNAKNTVYLQMNSLRPEDTAVYYCARVRTGWGLNAPDYAMDYWGKGTLVTVSS

SEQ ID NO: 2160 - protein, 295 aa, Artificial
  Nanobody construct
EVQLVESGGGLVQAGGSLRLSCAASGSIFNFNYMGWFRQAPGKEREFVAAIRWSGSSTYYADSVKGRFTISRDDAKNTVALQMNSLKPEDTAIYYCALRKGIPYSTSDRVIKGVNDYDYWGQGTQVTVSSGGGGSGGGGSGGGGSGGGGSGGGGSGGGGSGGGGSEVQLVESGGGLVQAGGSLRLSCAASGSIFNFNYMGWFRQAPGKEREFVAAIRWSGSSTYYADSVKGRFTISRDDAKNTVALQMNSLKPEDTAIYYCALRKGIPYSTSDRVIKGVNDYDYWGQGTQVTVSS

SEQ ID NO: 2161 - protein, 294 aa, Artificial
  Nanobody construct
EVQLVESGGGLVQAGGSLTLSCAVSGLTFNNYAMGWFRQVPGKEREFVAAISRSGLRTFYSDSVKGRFTISRDSAKSTVYVQMNNLKPEDTAVYFCAADRRTYYSEGPSLTDTLRYDYWGQGTQVTVSSGGGGSGGGGSGGGGSGGGGSGGGGSGGGGSGGGGSEVQLVESGGGLVQAGGSLRLSCAASGSIFNFNYMGWFRQAPGKEREFVAAIRWSGSSTYYADSVKGRFTISRDDAKNTVALQMNSLKPEDTAIYYCALRKGIPYSTSDRVIKGVNDYDYWGQGTQVTVSS

SEQ ID NO: 2162 - protein, 293 aa, Artificial
  Nanobody construct
EVQLVESGGGLVQAGGSLRLSCAASGRTSSSYSMGWFRQAPGKEREFVAYISGGGLTIYYAHSVKGRFTISRDNAKNTVYLQMNSLNSADTAVYSCAAPKRDLYLGSRYPVPESYDYWGQGTQVTVSSGGGGSGGGGSGGGGSGGGGSGGGGSGGGGSGGGGSEVQLVESGGGLVQAGGSLRLSCAASGSIFNFNYMGWFRQAPGKEREFVAAIRWSGSSTYYADSVKGRFTISRDDAKNTVALQMNSLKPEDTAIYYCALRKGIPYSTSDRVIKGVNDYDYWGQGTQVTVSS

SEQ ID NO: 2163 - protein, 292 aa, Artificial
  Nanobody construct
EVQLVESGGGLVQAGGSLRLSCAAPGRTFSEYAMGWFRQNPGNEREFVAAISRGGGFTDYADSVKGRFTISRDNAKNTVYLQMNSLKPEDTAVYYCAADGRSSFGIAKRSRYEYDSWGQGTQVTVSSGGGGSGGGGSGGGGSGGGGSGGGGSGGGGSGGGGSEVQLVESGGGLVQAGGSLRLSCAASGSIFNFNYMGWFRQAPGKEREFVAAIRWSGSSTYYADSVKGRFTISRDDAKNTVALQMNSLKPEDTAIYYCALRKGIPYSTSDRVIKGVNDYDYWGQGTQVTVSS

SEQ ID NO: 2164 - protein, 293 aa, Artificial
  Nanobody construct
EVQLVESGGGLVQPGGSLRLSCIASGLPFSTKSMGWFRQAPGKEREFVARISPGGTSRYYGDFVKGRFAISRDNAKNTTWLQMNSLKAEDTAVYYCASGERSTYIGSNYYRTNEYDYWGTGTQVTVSSGGGGSGGGGSGGGGSGGGGSGGGGSGGGGSGGGGSEVQLVESGGGLVQAGGSLRLSCAASGSIFNFNYMGWFRQAPGKEREFVAAIRWSGSSTYYADSVKGRFTISRDDAKNTVALQMNSLKPEDTAIYYCALRKGIPYSTSDRVIKGVNDYDYWGQGTQVTVSS

SEQ ID NO: 2165 - protein, 293 aa, Artificial
  Nanobody construct
EVQLVESGGGLVQAGGSLRLSCAASGRTLSSYAMGWFRQAPGKEREFVARISQGGTAIYYADSVKGRFTISRDNAKNTVYLQMNSLKPEDTAVYYCAKDPSPYYRGSAYLLSGSYDSWGQGTQVTVSSGGGGSGGGGSGGGGSGGGGSGGGGSGGGGSGGGGSEVQLVESGGGLVQAGGSLRLSCAASGSIFNFNYMGWFRQAPGKEREFVAAIRWSGSSTYYADSVKGRFTISRDDAKNTVALQMNSLKPEDTAIYYCALRKGIPYSTSDRVIKGVNDYDYWGQGTQVTVSS

SEQ ID NO: 2166 - protein, 289 aa, Artificial
  Nanobody construct
EVQLVESGGGLVQPGGSLRLSCAASGFTFSNYWMYWVRQAPGKGLERVAPLNPGGTITLYADFVKSRFTISRDNAKNTVYLQMNSLKPEDTAVYVCAAPSGTLYTRNKSGYIYWGQGTQVTVSSGGGGSGGGGSGGGGSGGGGSGGGGSGGGGSGGGGSEVQLVESGGGLVQAGGSLRLSCAASGSIFNFNYMGWFRQAPGKEREFVAAIRWSGSSTYYADSVKGRFTISRDDAKNTVALQMNSLKPEDTAIYYCALRKGIPYSTSDRVIKGVNDYDYWGQGTQVTVSS

SEQ ID NO: 2167 - protein, 290 aa, Artificial
  Nanobody construct
EVQLVESGGGLVQPGGSLRLSCAASGFYLDDYAIAWFRQAPGKEREGVSGIDSGDGSTYYADSVKGRFTISSDNAKNTVYLQMNSLRPEDTAVYYCARVRTGWGLNAPDYAMDYWGKGTLVTVSSGGGGSGGGGSGGGGSGGGGSGGGGSGGGGSGGGGSEVQLVESGGGLVQAGGSLRLSCAASGSIFNFNYMGWFRQAPGKEREFVAAIRWSGSSTYYADSVKGRFTISRDDAKNTVALQMNSLKPEDTAIYYCALRKGIPYSTSDRVIKGVNDYDYWGQGTQVTVSS

SEQ ID NO: 2168 - protein, 290 aa, Artificial
  Nanobody construct
EVQLVESGGGLVQPGGSLRLSCAASGFTLDDYAIAWFRQAPGKEREGVSGIDSGDGSAYYADSVKGRFTISSDNAKNTVYLQMNSLRPEDTAVYYCARVRTGWGLNAPDYAMDYWGKGTLVTVSSGGGGSGGGGSGGGGSGGGGSGGGGSGGGGSGGGGSEVQLVESGGGLVQAGGSLRLSCAASGSIFNFNYMGWFRQAPGKEREFVAAIRWSGSSTYYADSVKGRFTISRDDAKNTVALQMNSLKPEDTAIYYCALRKGIPYSTSDRVIKGVNDYDYWGQGTQVTVSS

SEQ ID NO: 2169 - protein, 295 aa, Artificial
  Nanobody construct
EVQLVESGGGLVQAGGSLTLSCAASVRTFSTSAMGWFRQAPGKEREFVAAINWNAGSTYHADSVKGRFTISGDNAKNSVFLQMNGLKPEDTAVYYCAAQASGRVTYFDYAYRRGSNYDYWGQGTQVTVSSGGGGSGGGGSGGGGSGGGGSGGGGSGGGGSGGGGSEVQLVESGGGLVQAGGSLRLSCAASGSIFNFNYMGWFRQAPGKEREFVAAIRWSGSSTYYADSVKGRFTISRDDAKNTVALQMNSLKPEDTAIYYCALRKGIPYSTSDRVIKGVNDYDYWGQGTQVTVSS

SEQ ID NO: 2170 - protein, 30 aa, Artificial
  framework sequence
EVQLVESGGGLVQPGGSLRLSCEASALTSF

SEQ ID NO: 2171 - protein, 30 aa, Artificial
  framework sequence
EVQLVESGGGLVQAGGSLRLSCVASERTFS

SEQ ID NO: 2172 - protein, 30 aa, Artificial
  framework sequence
EVQLVESGGGLVQPGGSLRLSCAASGFTVD

SEQ ID NO: 2173 - protein, 30 aa, Artificial; identical to SEQ ID NO: 2172
  framework sequence

SEQ ID NO: 2174 - protein, 30 aa, Artificial
  framework sequence
EVQLVESGGGLVQAGGSLRLSCAASGRTIS

SEQ ID NO: 2175 - protein, 30 aa, Artificial; identical to SEQ ID NO: 168
  framework sequence

SEQ ID NO: 2176 - protein, 30 aa, Artificial; identical to SEQ ID NO: 144
  framework sequence

SEQ ID NO: 2177 - protein, 30 aa, Artificial
  framework sequence
EVQLVESGGGLVQAGGSLRLSCAASGRSIS

SEQ ID NO: 2178 - protein, 30 aa, Artificial; identical to SEQ ID NO: 144
  framework sequence

SEQ ID NO: 2179 - protein, 30 aa, Artificial
  framework sequence
EVQLVESGGGLVQAGGSLRLSCAASGQTFS

SEQ ID NO: 2180 - protein, 30 aa, Artificial; identical to SEQ ID NO: 242
  framework sequence

SEQ ID NO: 2181 - protein, 30 aa, Artificial; identical to SEQ ID NO: 242
  framework sequence

SEQ ID NO: 2182 - protein, 30 aa, Artificial; identical to SEQ ID NO: 144
  framework sequence

SEQ ID NO: 2183 - protein, 30 aa, Artificial
  framework sequence
EVQLVESGGGLVQAGGSLRLSCAASGRSFS

SEQ ID NO: 2184 - protein, 30 aa, Artificial; identical to SEQ ID NO: 144
  framework sequence

SEQ ID NO: 2185 - protein, 30 aa, Artificial
  framework sequence
EVQLVESGGGLVQAGGSLRLSCAASDRTFS

SEQ ID NO: 2186 - protein, 30 aa, Artificial
  framework sequence
EVQLVESGGGSVQTGGSLRLSCAASGLTPS

SEQ ID NO: 2187 - protein, 30 aa, Artificial
  framework sequence
EVQLVESGGGLVQAGGSLRLSCAVSGDTFS

SEQ ID NO: 2188 - protein, 30 aa, Artificial
  framework sequence
EVQLVESGGGSVQAGGSLRLSCVASGLYFN

SEQ ID NO: 2189 - protein, 30 aa, Artificial
  framework sequence
EVQLVESGGGLVQPGGSLRLSCAASGFSLD

SEQ ID NO: 2190 - protein, 30 aa, Artificial
  framework sequence
EVQLVESGGGLVQAGASLRLSCAASGRTFR

SEQ ID NO: 2191 - protein, 30 aa, Artificial
  framework sequence
EVQLVESGGGLVPPGGSLRLSCAASGFTFS

SEQ ID NO: 2192 - protein, 30 aa, Artificial; identical to SEQ ID NO: 135
  framework sequence

SEQ ID NO: 2193 - protein, 30 aa, Artificial; identical to SEQ ID NO: 144
  framework sequence

SEQ ID NO: 2194 - protein, 30 aa, Artificial
  framework sequence
EVQLVESGGGLVQAGGSLRLSCAASGRTFN

SEQ ID NO: 2195 - protein, 30 aa, Artificial; identical to SEQ ID NO: 144
  framework sequence

SEQ ID NO: 2196 - protein, 30 aa, Artificial
  framework sequence
EVQLVESGGGLVQAGGSLRLSCASSGRTFS

SEQ ID NO: 2197 - protein, 30 aa, Artificial; identical to SEQ ID NO: 144
  framework sequence

SEQ ID NO: 2198 - protein, 30 aa, Artificial; identical to SEQ ID NO: 144
  framework sequence

SEQ ID NO: 2199 - protein, 30 aa, Artificial
  framework sequence
EVQLVESGGELVQAGGSLRLSCAASGSIVS

SEQ ID NO: 2200 - protein, 30 aa, Artificial; identical to SEQ ID NO: 222
  framework sequence

SEQ ID NO: 2201 - protein, 30 aa, Artificial; identical to SEQ ID NO: 221
  framework sequence

SEQ ID NO: 2202 - protein, 30 aa, Artificial; identical to SEQ ID NO: 221
  framework sequence

SEQ ID NO: 2203 - protein, 30 aa, Artificial
  framework sequence
EVQLVESGGGVVQAGESLRLSCAASGYNFK

SEQ ID NO: 2204 - protein, 30 aa, Artificial
  framework sequence
EVQPVESGGGVVQAGESLRLSCAASGRSFS

SEQ ID NO: 2205 - protein, 30 aa, Artificial; identical to SEQ ID NO: 189
  framework sequence

SEQ ID NO: 2206 - protein, 30 aa, Artificial
  framework sequence
EVQLVESGGGVVQAGETLRLSCAASGRSFS

SEQ ID NO: 2207 - protein, 30 aa, Artificial; identical to SEQ ID NO: 189
  framework sequence

SEQ ID NO: 2208 - protein, 30 aa, Artificial
  framework sequence
EVQLVESGGGVVQAGESLRLSCAASGRTFS

SEQ ID NO: 2209 - protein, 30 aa, Artificial; identical to SEQ ID NO: 189
  framework sequence

SEQ ID NO: 2210 - protein, 30 aa, Artificial; identical to SEQ ID NO: 135
  framework sequence

SEQ ID NO: 2211 - protein, 30 aa, Artificial
  framework sequence
EVQLVESGGGSVQAGGSLRLSCKVSGIMFS

SEQ ID NO: 2212 - protein, 30 aa, Artificial; identical to SEQ ID NO: 142
  framework sequence

SEQ ID NO: 2213 - protein, 30 aa, Artificial; identical to SEQ ID NO: 219
  framework sequence

SEQ ID NO: 2214 - protein, 30 aa, Artificial
  framework sequence
EVQLVESGGGLVQAGGSLRLSCAASGFTFS

SEQ ID NO: 2215 - protein, 6 aa, Artificial
  CDR sequence
SNYAMY

SEQ ID NO: 2216 - protein, 5 aa, Artificial
  CDR sequence
SSAMG

SEQ ID NO: 2217 - protein, 5 aa, Artificial
  CDR sequence
YHGIA

SEQ ID NO: 2218 - protein, 5 aa, Artificial
  CDR sequence
YHGIA

SEQ ID NO: 2219 - protein, 5 aa, Artificial
  CDR sequence
NYGMG

SEQ ID NO: 2220 - protein, 5 aa, Artificial
  CDR sequence
YLAIG

SEQ ID NO: 2221 - protein, 5 aa, Artificial
  CDR sequence
IYAMG

SEQ ID NO: 2222 - protein, 5 aa, Artificial
  CDR sequence
SYAMG

SEQ ID NO: 2223 - protein, 5 aa, Artificial
  CDR sequence
INALG

SEQ ID NO: 2224 - protein, 5 aa, Artificial
  CDR sequence
IHAMG

SEQ ID NO: 2225 - protein, 5 aa, Artificial
  CDR sequence
SYAMG

SEQ ID NO: 2226 - protein, 5 aa, Artificial
  CDR sequence
SYAIG

SEQ ID NO: 2227 - protein, 5 aa, Artificial
  CDR sequence
IYYMG

SEQ ID NO: 2228 - protein, 5 aa, Artificial
  CDR sequence
DYAMG

SEQ ID NO: 2229 - protein, 5 aa, Artificial
  CDR sequence
VYAMG

SEQ ID NO: 2230 - protein, 5 aa, Artificial
  CDR sequence
SYAMA

SEQ ID NO: 2231 - protein, 7 aa, Artificial
  CDR sequence
FSLYNMA

SEQ ID NO: 2232 - protein, 5 aa, Artificial
  CDR sequence
VYGMG

SEQ ID NO: 2233 - protein, 5 aa, Artificial
  CDR sequence
GNGLG

SEQ ID NO: 2234 - protein, 5 aa, Artificial
  CDR sequence
YTAIG

SEQ ID NO: 2235 - protein, 5 aa, Artificial
  CDR sequence
SYNMG

SEQ ID NO: 2236 - protein, 5 aa, Artificial
  CDR sequence
SYAMS

SEQ ID NO: 2237 - protein, 5 aa, Artificial
  CDR sequence
INGMG

SEQ ID NO: 2238 - protein, 5 aa, Artificial
  CDR sequence
TYPMG

SEQ ID NO: 2239 - protein, 5 aa, Artificial
  CDR sequence
NYLVG

SEQ ID NO: 2240 - protein, 5 aa, Artificial
  CDR sequence
GYDMG

SEQ ID NO: 2241 - protein, 5 aa, Artificial
  CDR sequence
IYARG

SEQ ID NO: 2242 - protein, 5 aa, Artificial
  CDR sequence
WSAVG

SEQ ID NO: 2243 - protein, 5 aa, Artificial
  CDR sequence
SDAVG

SEQ ID NO: 2244 - protein, 5 aa, Artificial
  CDR sequence
ISAMA

SEQ ID NO: 2245 - protein, 5 aa, Artificial
  CDR sequence
NDAMG

SEQ ID NO: 2246 - protein, 5 aa, Artificial
  CDR sequence
DYEMG

SEQ ID NO: 2247 - protein, 5 aa, Artificial
  CDR sequence
DYEMG

SEQ ID NO: 2248 - protein, 5 aa, Artificial
  CDR sequence
DHDLG

SEQ ID NO: 2249 - protein, 5 aa, Artificial
  CDR sequence
DYEMG

SEQ ID NO: 2250 - protein, 5 aa, Artificial
  CDR sequence
NYEMG

SEQ ID NO: 2251 - protein, 5 aa, Artificial
  CDR sequence
NYEMG

SEQ ID NO: 2252 - protein, 5 aa, Artificial
  CDR sequence
NYEMG

SEQ ID NO: 2253 - protein, 5 aa, Artificial
  CDR sequence
NYEMG

SEQ ID NO: 2254 - protein, 5 aa, Artificial
  CDR sequence
NYEMG

SEQ ID NO: 2255 - protein, 5 aa, Artificial
  CDR sequence
INAMG

SEQ ID NO: 2256 - protein, 5 aa, Artificial
  CDR sequence
DKGMG

SEQ ID NO: 2257 - protein, 5 aa, Artificial
  CDR sequence
SSVMF

SEQ ID NO: 2258 - protein, 5 aa, Artificial
  CDR sequence
DNTMG

SEQ ID NO: 2259 - protein, 5 aa, Artificial
  CDR sequence
SYWMY

SEQ ID NO: 2260 - protein, 14 aa, Artificial
  framework sequence
WVRQAPGKALEWVS

SEQ ID NO: 2261 - protein, 14 aa, Artificial
  framework sequence
WFRQAPGKEREFVA

SEQ ID NO: 2262 - protein, 14 aa, Artificial
  framework sequence
WFRQAPGKGPEGVS

SEQ ID NO: 2263 - protein, 14 aa, Artificial
  framework sequence
WFRQAPGKGPEGVS

SEQ ID NO: 2264 - protein, 14 aa, Artificial
  framework sequence
WFRQAPGKEREFVA

SEQ ID NO: 2265 - protein, 14 aa, Artificial
  framework sequence
WFRQAPGKEREGVS

SEQ ID NO: 2266 - protein, 14 aa, Artificial
  framework sequence
WFRQAPGKEREFVA

SEQ ID NO: 2267 - protein, 14 aa, Artificial
  framework sequence
WFRQAPGKEREFVA

SEQ ID NO: 2268 - protein, 14 aa, Artificial
  framework sequence
WFRQAPGKEREFVA

SEQ ID NO: 2269 - protein, 14 aa, Artificial
  framework sequence
WFRQAPGKEREFVA

SEQ ID NO: 2270 - protein, 14 aa, Artificial
  framework sequence
WFRQAPGKERDFVA

SEQ ID NO: 2271 - protein, 14 aa, Artificial
  framework sequence
WFRQAPGKEREFVA

SEQ ID NO: 2272 - protein, 14 aa, Artificial
  framework sequence
WFRQAPGKEREFVA

SEQ ID NO: 2273 - protein, 14 aa, Artificial
  framework sequence
WFRQTPGKEREFVA

SEQ ID NO: 2274 - protein, 14 aa, Artificial
  framework sequence
WFRQAPGKEREFVA

SEQ ID NO: 2275 - protein, 14 aa, Artificial
  framework sequence
WFRQAPGKEREFVA

SEQ ID NO: 2276 - protein, 14 aa, Artificial
  framework sequence
WFRQAPGKEREFVA

SEQ ID NO: 2277 - protein, 14 aa, Artificial
  framework sequence
WFRQAPGMEREFVA

SEQ ID NO: 2278 - protein, 14 aa, Artificial
  framework sequence
WFRQAPGKEREFVA

SEQ ID NO: 2279 - protein, 14 aa, Artificial
  framework sequence
WFRQAPGKEREVVS

SEQ ID NO: 2280 - protein, 14 aa, Artificial
  framework sequence
WLRQAPGKEREFVA

SEQ ID NO: 2281 - protein, 14 aa, Artificial
  framework sequence
WVRRAPGRGLEWIS

SEQ ID NO: 2282 - protein, 14 aa, Artificial
  framework sequence
WFRQAPGKEREFVS

SEQ ID NO: 2283 - protein, 14 aa, Artificial
  framework sequence
YFRQAPGKERELVA

SEQ ID NO: 2284 - protein, 14 aa, Artificial
  framework sequence
WFRQAPGKEREFVA

SEQ ID NO: 2285 - protein, 14 aa, Artificial
  framework sequence
WFRQAPGKEREFVA

SEQ ID NO: 2286 - protein, 14 aa, Artificial
  framework sequence
WFRQAPGKEREFVA

SEQ ID NO: 2287 - protein, 14 aa, Artificial
  framework sequence
WFRQAPGKEREFVA

SEQ ID NO: 2288 - protein, 14 aa, Artificial
  framework sequence
WFRQAPGLERVFVA

SEQ ID NO: 2289 - protein, 14 aa, Artificial
  framework sequence
WYRQAPGKQRERVA

SEQ ID NO: 2290 - protein, 14 aa, Artificial
  framework sequence
WFRQAPGKERSFVA

SEQ ID NO: 2291 - protein, 14 aa, Artificial
  framework sequence
WFRQAPGMEREFAA

SEQ ID NO: 2292 - protein, 14 aa, Artificial
  framework sequence
WFRQAPGMEREFAA

SEQ ID NO: 2293 - protein, 14 aa, Artificial
  framework sequence
WFRQAPGMEREFVA

SEQ ID NO: 2294 - protein, 14 aa, Artificial
  framework sequence
WFRQAPGTEREFVA

SEQ ID NO: 2295 - protein, 14 aa, Artificial
  framework sequence
WFRQAPGTEREFVG

SEQ ID NO: 2296 - protein, 14 aa, Artificial
  framework sequence
WFRQAPGTEREFVG

SEQ ID NO: 2297 - protein, 14 aa, Artificial
  framework sequence
WFRQAPGTEREFVG

SEQ ID NO: 2298 - protein, 14 aa, Artificial
  framework sequence
WFRQAPGTEREFVA

SEQ ID NO: 2299 - protein, 14 aa, Artificial
  framework sequence
WFRQAPGTEREFVA

SEQ ID NO: 2300 - protein, 14 aa, Artificial
  framework sequence
WFRQAPGKERQFVA

SEQ ID NO: 2301 - protein, 14 aa, Artificial
  framework sequence
WFRQAPGKERETVA

SEQ ID NO: 2302 - protein, 14 aa, Artificial
  framework sequence
WLRQAPGKGLEWLS

SEQ ID NO: 2303 - protein, 14 aa, Artificial
  framework sequence
WFRQAPGKEREFVA

SEQ ID NO: 2304 - protein, 14 aa, Artificial
  framework sequence
WFRQAPGKGLEWVS

SEQ ID NO: 2305 - protein, 17 aa, Artificial
  CDR sequence
AISRAGSNTYYADSVKG

SEQ ID NO: 2306 - protein, 18 aa, Artificial
  CDR sequence
AIGWSGGGFIHYGDSVKG

SEQ ID NO: 2307 - protein, 17 aa, Artificial
  CDR sequence
CIRNSDGRTYYADSVKG

SEQ ID NO: 2308 - protein, 17 aa, Artificial
  CDR sequence
CIRNSDGRTYYADSVKG

SEQ ID NO: 2309 - protein, 17 aa, Artificial
  CDR sequence
AISARSAMIGYSDSVKG

SEQ ID NO: 2310 - protein, 17 aa, Artificial
  CDR sequence
CVSSSGQYTYYADSVKG

SEQ ID NO: 2311 - protein, 17 aa, Artificial
  CDR sequence
AITWIGDSTYYADSVKG

SEQ ID NO: 2312 - protein, 17 aa, Artificial
  CDR sequence
TITWSGGSTYYADSVKG

SEQ ID NO: 2313 - protein, 17 aa, Artificial
  CDR sequence
AVNWSGGNTYYADSVKG

SEQ ID NO: 2314 - protein, 17 aa, Artificial
  CDR sequence
HISWSGGSTYYADSVKG

SEQ ID NO: 2315 - protein, 17 aa, Artificial
  CDR sequence
AIDWSGSTTTYADSVKG

SEQ ID NO: 2316 - protein, 17 aa, Artificial
  CDR sequence
AITWIERSTYYADSVKG

SEQ ID NO: 2317 - protein, 17 aa, Artificial
  CDR sequence
AITWIGGDTYYADSVKG

SEQ ID NO: 2318 - protein, 17 aa, Artificial
  CDR sequence
AISWSDGSTYYANSVKG

SEQ ID NO: 2319 - protein, 17 aa, Artificial
  CDR sequence
AITWSGGETYYANSVKG

SEQ ID NO: 2320 - protein, 17 aa, Artificial
  CDR sequence
QIIWSGGSTYYADSVKG

SEQ ID NO: 2321 - protein, 17 aa, Artificial
  CDR sequence
SITWSGTSTSYLDSVKG

SEQ ID NO: 2322 - protein, 17 aa, Artificial
  CDR sequence
GISWNAGITAYTDTLKG

SEQ ID NO: 2323 - protein, 17 aa, Artificial
  CDR sequence
AIAWNGARINYADSVKG

SEQ ID NO: 2324 - protein, 17 aa, Artificial
  CDR sequence
CFTSVPGSTYHADSVKG

SEQ ID NO: 2325 - protein, 17 aa, Artificial
  CDR sequence
TISWNAGIPYYADSVKG

SEQ ID NO: 2326 - protein, 17 aa, Artificial
  CDR sequence
SISSGSDTTHVAGSVRG

SEQ ID NO: 2327 - protein, 18 aa, Artificial
  CDR sequence
GINWSGSGNTYHADSVKG

SEQ ID NO: 2328 - protein, 17 aa, Artificial
  CDR sequence
AISRGGGSTYYEDSVKG

SEQ ID NO: 2329 - protein, 17 aa, Artificial
  CDR sequence
AVRWEYGITEYADSVKG

SEQ ID NO: 2330 - protein, 17 aa, Artificial
  CDR sequence
QISRHNSNTYYADAVKG

SEQ ID NO: 2331 - protein, 15 aa, Artificial
  CDR sequence
AIRSGLTTYSDSVKG

SEQ ID NO: 2332 - protein, 17 aa, Artificial
  CDR sequence
AIRWSGGSPYYADSVKD

SEQ ID NO: 2333 - protein, 17 aa, Artificial
  CDR sequence
AIRWSGGSAYYADSAKG

SEQ ID NO: 2334 - protein, 16 aa, Artificial
  CDR sequence
TITRGGTPDYADSAKD

SEQ ID NO: 2335 - protein, 17 aa, Artificial
  CDR sequence
AINWSGELTGYAGSVKG

SEQ ID NO: 2336 - protein, 17 aa, Artificial
  CDR sequence
AISWRGSSTYYADSVKG

SEQ ID NO: 2337 - protein, 17 aa, Artificial
  CDR sequence
AISWRGSSTYYADSVKG

SEQ ID NO: 2338 - protein, 17 aa, Artificial
  CDR sequence
AISWRGSSTYYADSVKG

SEQ ID NO: 2339 - protein, 17 aa, Artificial
  CDR sequence
TINRRGSSTYYADSVKG

SEQ ID NO: 2340 - protein, 17 aa, Artificial
  CDR sequence
SINRRGSSTYYADSVKG

SEQ ID NO: 2341 - protein, 17 aa, Artificial
  CDR sequence
TINRRGSSTYYTDSVKG

SEQ ID NO: 2342 - protein, 17 aa, Artificial
  CDR sequence
AINRRGSSTYYADSAKG

SEQ ID NO: 2343 - protein, 16 aa, Artificial
  CDR sequence
SISRRYSTYYPDSVKG

SEQ ID NO: 2344 - protein, 17 aa, Artificial
  CDR sequence
AISRRRSSTYYADSVKG

SEQ ID NO: 2345 - protein, 17 aa, Artificial
  CDR sequence
AINWSTGSTYYSDSVKG

SEQ ID NO: 2346 - protein, 17 aa, Artificial
  CDR sequence
ATNWSGGSTYYADSVKG

SEQ ID NO: 2347 - protein, 16 aa, Artificial
  CDR sequence
TIKPTGSTIYPGSGKG

SEQ ID NO: 2348 - protein, 17 aa, Artificial
  CDR sequence
AIAGRGSRLNYADSVKG

SEQ ID NO: 2349 - protein, 17 aa, Artificial
  CDR sequence
SINSGSGNTYYADSVKG

SEQ ID NO: 2350 - protein, 32 aa, Artificial
  framework sequence
RFTISRDNAKDTLYLQMNSLRSEDTGVYYCAV

SEQ ID NO: 2351 - protein, 32 aa, Artificial
  framework sequence
RFTISADNGKNTVYLQMNSLKPEDTAVYYCAA

SEQ ID NO: 2352 - protein, 32 aa, Artificial
  framework sequence
RFTISRDNAKNTVYLQMNSLKLEDTAIYYCAT

SEQ ID NO: 2353 - protein, 32 aa, Artificial
  framework sequence
RFTISRDNAKNTVYLQMNSLKPEDTAIYYCAT

SEQ ID NO: 2354 - protein, 32 aa, Artificial; identical to SEQ ID NO: 112
  framework sequence

SEQ ID NO: 2355 - protein, 32 aa, Artificial
  framework sequence
RFTISRDNAESTVYLQMNSLKPEDTAVYYCAT

SEQ ID NO: 2356 - protein, 32 aa, Artificial
  framework sequence
RFTIARDNAKNTVYLQMNSLKPEDTAVYYCAA

SEQ ID NO: 2357 - protein, 32 aa, Artificial
  framework sequence
RFTISRDNAKNVVYLQMNNLKPEDTAVYYCAA

SEQ ID NO: 2358 - protein, 32 aa, Artificial
  framework sequence
RFTISKDNAKNTVYLQMNSLKPDDTAVYYCAA

SEQ ID NO: 2359 - protein, 32 aa, Artificial
  framework sequence
RFAISRDNAKNTVYLQMNSLKPEDTAVYYCAA

SEQ ID NO: 2360 - protein, 32 aa, Artificial; identical to SEQ ID NO: 112
  framework sequence

SEQ ID NO: 2361 - protein, 32 aa, Artificial
  framework sequence
RFTISRDNAKNTVYLQMNSLEPEDTAVYYCGA

SEQ ID NO: 2362 - protein, 32 aa, Artificial
  framework sequence
RFTISRDNAKNTVYLQMNSLKPEDTAVYYCAV

SEQ ID NO: 2363 - protein, 32 aa, Artificial
  framework sequence
RFTTSRDNAKNTVYLQMNNLKPEDTAVYYCAA

SEQ ID NO: 2364 - protein, 32 aa, Artificial
  framework sequence
RFTISRDNAKNTVYLQMSGLKPEDTAVYYCAA

SEQ ID NO: 2365 - protein, 32 aa, Artificial
  framework sequence
RFTISGDNAKNTVYLQMNRLKPEDTAVYYCAA

SEQ ID NO: 2366 - protein, 32 aa, Artificial
  framework sequence
RFIISRDNAKNTVYLQMNILKPEDTAVYYCAA

SEQ ID NO: 2367 - protein, 32 aa, Artificial
  framework sequence
RFTISRDRAKNTMYLQMNSLQPEDTAVYYCAA

SEQ ID NO: 2368 - protein, 32 aa, Artificial
  framework sequence
RFTVSRDNIKNTVYLQMNSLKPEDTAVYYCAS

SEQ ID NO: 2369 - protein, 32 aa, Artificial
  framework sequence
RFTIASDNAKNTVYLQMNDLKPEDTAVYYCAT

SEQ ID NO: 2370 - protein, 32 aa, Artificial; identical to SEQ ID NO: 112
  framework sequence

SEQ ID NO: 2371 - protein, 32 aa, Artificial
  framework sequence
RFTISRDNAKNTLYLQMNSLKPDDTAVYYCVR

SEQ ID NO: 2372 - protein, 32 aa, Artificial
  framework sequence
RATISRDNAKNTVYLQMNSLKPEDTAVYYCAA

SEQ ID NO: 2373 - protein, 32 aa, Artificial; identical to SEQ ID NO: 2362
  framework sequence

SEQ ID NO: 2374 - protein, 32 aa, Artificial
  framework sequence
RFTISRDNAKNTVYLQMSSLRPEETAVYYCAA

SEQ ID NO: 2375 - protein, 32 aa, Artificial
  framework sequence
RFTISRDNAKNTVSLQMNSLKPEDTAVYYCAI

SEQ ID NO: 2376 - protein, 32 aa, Artificial
  framework sequence
RFTISRDIAKNTVFLQMNSLKSEDTAVYYCAA

SEQ ID NO: 2377 - protein, 32 aa, Artificial
  framework sequence
RFTISRDNAKNTVYLQMNSLRPEDTAVYLCGE

SEQ ID NO: 2378 - protein, 32 aa, Artificial
  framework sequence
RFTISRDNAKNTVYLQMNSLKPEDTAVYYCGA

SEQ ID NO: 2379 - protein, 32 aa, Artificial
  framework sequence
RFTISRDNAKNTVSLQMNNLKPEDTAVYYCKA

SEQ ID NO: 2380 - protein, 32 aa, Artificial
  framework sequence
RFTISRDGVENMVFLQMNSLVPEDTGVYYCAA

SEQ ID NO: 2381 - protein, 32 aa, Artificial; identical to SEQ ID NO: 1209
  framework sequence

SEQ ID NO: 2382 - protein, 32 aa, Artificial; identical to SEQ ID NO: 1209
  framework sequence

SEQ ID NO: 2383 - protein, 32 aa, Artificial; identical to SEQ ID NO: 1209
  framework sequence

SEQ ID NO: 2384 - protein, 32 aa, Artificial
  framework sequence
RFTISRDNAKNTVYLQMSSLKSEDTAVYYCAA

SEQ ID NO: 2385 - protein, 32 aa, Artificial; identical to SEQ ID NO: 1209
  framework sequence

SEQ ID NO: 2386 - protein, 32 aa, Artificial
  framework sequence
RFSISRDNAKNTMYLQMSSLKPEDTAVYYCAA

SEQ ID NO: 2387 - protein, 32 aa, Artificial; identical to SEQ ID NO: 1197
  framework sequence

SEQ ID NO: 2388 - protein, 32 aa, Artificial
  framework sequence
RFTISRDNAKNTVYLQMSSLKPDDTAVYYCAA

SEQ ID NO: 2389 - protein, 32 aa, Artificial; identical to SEQ ID NO: 1209
  framework sequence

SEQ ID NO: 2390 - protein, 32 aa, Artificial
  framework sequence
RFTISRDNAKNTVYLQMNSLKPEDTAVYFCAS

SEQ ID NO: 2391 - protein, 32 aa, Artificial
  framework sequence
RFTISRDNYKNTLHLQMASLKPEDTGIYYCAA

SEQ ID NO: 2392 - protein, 32 aa, Artificial
  framework sequence
RFTISRDNAKNTLYLQINNLKPEDTALYYCAR

SEQ ID NO: 2393 - protein, 32 aa, Artificial
  framework sequence
RFTISRDNTKNTVYLQMNSLKPEDTAIYYCAA

SEQ ID NO: 2394 - protein, 32 aa, Artificial; identical to SEQ ID NO: 1210
  framework sequence

SEQ ID NO: 2395 - protein, 6 aa, Artificial
  CDR sequence
DSSGTW

SEQ ID NO: 2396 - protein, 16 aa, Artificial
  CDR sequence
DSRLRGIALLKGSYDY

SEQ ID NO: 2397 - protein, 14 aa, Artificial
  CDR sequence
TTGRIGVNCVPSNT

SEQ ID NO: 2398 - protein, 14 aa, Artificial
  CDR sequence
TTGRIGVNCVPSNT

SEQ ID NO: 2399 - protein, 16 aa, Artificial
  CDR sequence
DLNRRVPTARPQEYDG

SEQ ID NO: 2400 - protein, 17 aa, Artificial
  CDR sequence
DPECYRVRGYYNGEYDY

SEQ ID NO: 2401 - protein, 12 aa, Artificial
  CDR sequence
EREATMTLNFDS

SEQ ID NO: 2402 - protein, 12 aa, Artificial
  CDR sequence
DLSSGLDVDFGS

SEQ ID NO: 2403 - protein, 12 aa, Artificial
  CDR sequence
DEYGGISVDFGS

SEQ ID NO: 2404 - protein, 12 aa, Artificial
  CDR sequence
DDMRELVTTFHY

SEQ ID NO: 2405 - protein, 13 aa, Artificial
  CDR sequence
DMSHSPIEIDFGS

SEQ ID NO: 2406 - protein, 13 aa, Artificial
  CDR sequence
DDRGDLMSVDFRS

SEQ ID NO: 2407 - protein, 12 aa, Artificial
  CDR sequence
DDRTNMSVDFGS

SEQ ID NO: 2408 - protein, 13 aa, Artificial
  CDR sequence
RRLVYYSDPKYDY

SEQ ID NO: 2409 - protein, 15 aa, Artificial
  CDR sequence
DPSSDLVTVFGDSAS

SEQ ID NO: 2410 - protein, 14 aa, Artificial
  CDR sequence
DSGRTDWTADLYDY

SEQ ID NO: 2411 - protein, 16 aa, Artificial
  CDR sequence
RARFAGTSMTPGGYVY

SEQ ID NO: 2412 - protein, 20 aa, Artificial
  CDR sequence
DVTRHYIATRSKVDASMYDY

SEQ ID NO: 2413 - protein, 15 aa, Artificial
  CDR sequence
ARSGYASISINEYDY

SEQ ID NO: 2414 - protein, 20 aa, Artificial
  CDR sequence
DAQTYYSGSYCGRTPQEYPY

SEQ ID NO: 2415 - protein, 13 aa, Artificial
  CDR sequence
SNSWSSSARFYDY

SEQ ID NO: 2416 - protein, 17 aa, Artificial
  CDR sequence
AYDSIVPSPTQRTNYEY

SEQ ID NO: 2417 - protein, 18 aa, Artificial
  CDR sequence
SERTYYSSSYYYRRFYDY

SEQ ID NO: 2418 - protein, 16 aa, Artificial
  CDR sequence
QLVGDSVSSYTRHYGY

SEQ ID NO: 2419 - protein, 16 aa, Artificial
  CDR sequence
GTVRRSKFSNPIDYDY

SEQ ID NO: 2420 - protein, 14 aa, Artificial
  CDR sequence
GSLFPSSRERDYDY

SEQ ID NO: 2421 - protein, 19 aa, Artificial
  CDR sequence
AVNYFTDFTDYSKRDSYDY

SEQ ID NO: 2422 - protein, 14 aa, Artificial
  CDR sequence
TSLFPTSRGSHYDT

SEQ ID NO: 2423 - protein, 14 aa, Artificial
  CDR sequence
TSLFPSSRGSHYDS

SEQ ID NO: 2424 - protein, 14 aa, Artificial
  CDR sequence
ALRTPTHDYNYYDY

SEQ ID NO: 2425 - protein, 15 aa, Artificial
  CDR sequence
VEGRDYYRGAQYYDY

SEQ ID NO: 2426 - protein, 14 aa, Artificial
  CDR sequence
GRLYPSSRSRDYDY

SEQ ID NO: 2427 - protein, 14 aa, Artificial
  CDR sequence
GRLYPSSRSRDYDY

SEQ ID NO: 2428 - protein, 14 aa, Artificial
  CDR sequence
GRLYPSSRSRDYDY

SEQ ID NO: 2429 - protein, 14 aa, Artificial
  CDR sequence
GWLYPSSRSRDYDY

SEQ ID NO: 2430 - protein, 14 aa, Artificial
  CDR sequence
GWLYPSSRSRDYDY

SEQ ID NO: 2431 - protein, 14 aa, Artificial
  CDR sequence
GWLFPSSRSRDYDY

SEQ ID NO: 2432 - protein, 14 aa, Artificial
  CDR sequence
GWLFPSSRSRDYDY

SEQ ID NO: 2433 - protein, 14 aa, Artificial
  CDR sequence
GQLFPSSRSRDYDY

SEQ ID NO: 2434 - protein, 14 aa, Artificial
  CDR sequence
GALFPSSRSRDYDY

SEQ ID NO: 2435 - protein, 14 aa, Artificial
  CDR sequence
GYLFPSSRGSQYDY

SEQ ID NO: 2436 - protein, 15 aa, Artificial
  CDR sequence
AGDSWNSRRIEDYDY

SEQ ID NO: 2437 - protein, 6 aa, Artificial
  CDR sequence
DIGGTV

SEQ ID NO: 2438 - protein, 16 aa, Artificial
  CDR sequence
KPYGRVYYTEGSNYDY

SEQ ID NO: 2439 - protein, 19 aa, Artificial
  CDR sequence
ARTFYSRTYYPVNRDEYDY

SEQ ID NO: 2440 - protein, 11 aa, Artificial
  framework sequence
RGQGTQVTVSS

SEQ ID NO: 2441 - protein, 11 aa, Artificial
  framework sequence
RGQGTQVTVSS

SEQ ID NO: 2442 - protein, 11 aa, Artificial
  framework sequence
RGQGTQVTVSS

SEQ ID NO: 2443 - protein, 11 aa, Artificial
  framework sequence
RGQGTQVTVSS

SEQ ID NO: 2444 - protein, 11 aa, Artificial
  framework sequence
WGQGTQVTVSS

SEQ ID NO: 2445 - protein, 11 aa, Artificial
  framework sequence
WGQGTQVTVSS

SEQ ID NO: 2446 - protein, 11 aa, Artificial
  framework sequence
WGQGTQVTVSS

SEQ ID NO: 2447 - protein, 11 aa, Artificial
  framework sequence
WGQGTQVTVSS

SEQ ID NO: 2448 - protein, 11 aa, Artificial
  framework sequence
WGQGTRVTVSS

SEQ ID NO: 2449 - protein, 11 aa, Artificial
  framework sequence
WGQGTQVTVSS

SEQ ID NO: 2450 - protein, 11 aa, Artificial
  framework sequence
WGQGTQVTVSS

SEQ ID NO: 2451 - protein, 11 aa, Artificial
  framework sequence
WGQGTQVTVSS

SEQ ID NO: 2452 - protein, 11 aa, Artificial
  framework sequence
WGQGTQVTVSS

SEQ ID NO: 2453 - protein, 11 aa, Artificial
  framework sequence
WGQGTQVTVSS

SEQ ID NO: 2454 - protein, 11 aa, Artificial
  framework sequence
WGQGTQVTVSS

SEQ ID NO: 2455 - protein, 11 aa, Artificial
  framework sequence
WGQGTQVTVSS

SEQ ID NO: 2456 - protein, 11 aa, Artificial
  framework sequence
WGQGTQVTVSS

SEQ ID NO: 2457 - protein, 11 aa, Artificial
  framework sequence
WGQGTQVTVSS

SEQ ID NO: 2458 - protein, 11 aa, Artificial
  framework sequence
WGQGTQVTVSS

SEQ ID NO: 2459 - protein, 11 aa, Artificial
  framework sequence
WGQGTQVTVSS

SEQ ID NO: 2460 - protein, 11 aa, Artificial
  framework sequence
WGQGTQVTVSS

SEQ ID NO: 2461 - protein, 11 aa, Artificial
  framework sequence
RGQGTQVTVSS

SEQ ID NO: 2462 - protein, 11 aa, Artificial
  framework sequence
WGQGTQVTVSS

SEQ ID NO: 2463 - protein, 11 aa, Artificial
  framework sequence
WGPGAQVTVSS

SEQ ID NO: 2464 - protein, 11 aa, Artificial
  framework sequence
WGQGTQVTVSS

SEQ ID NO: 2465 - protein, 11 aa, Artificial
  framework sequence
WGQGTQVTVSS

SEQ ID NO: 2466 - protein, 11 aa, Artificial
  framework sequence
WGQGTQVTVSS

SEQ ID NO: 2467 - protein, 11 aa, Artificial
  framework sequence
WGQGTQVTVSS

SEQ ID NO: 2468 - protein, 11 aa, Artificial
  framework sequence
WGQGTQVTVSS

SEQ ID NO: 2469 - protein, 11 aa, Artificial
  framework sequence
WGQGTQVTVSS

SEQ ID NO: 2470 - protein, 11 aa, Artificial
  framework sequence
WGQGTQVTVSS

SEQ ID NO: 2471 - protein, 11 aa, Artificial
  framework sequence
WGQGTQVTVSS

SEQ ID NO: 2472 - protein, 11 aa, Artificial
  framework sequence
WGQGTQVTVSS

SEQ ID NO: 2473 - protein, 11 aa, Artificial
  framework sequence
WGQGTQVTVSS

SEQ ID NO: 2474 - protein, 11 aa, Artificial
  framework sequence
WGQGTQVTVSS

SEQ ID NO: 2475 - protein, 11 aa, Artificial
  framework sequence
WGQGTQVTVSS

SEQ ID NO: 2476 - protein, 11 aa, Artificial
  framework sequence
WGQGTQVTVSS

SEQ ID NO: 2477 - protein, 11 aa, Artificial
  framework sequence
WGQGTQVTVSS

SEQ ID NO: 2478 - protein, 11 aa, Artificial
  framework sequence
WGQGTQVTVSS

SEQ ID NO: 2479 - protein, 11 aa, Artificial
  framework sequence
WGQGTQVTVSS

SEQ ID NO: 2480 - protein, 11 aa, Artificial
  framework sequence
WGQGTQVTVSS

SEQ ID NO: 2481 - protein, 11 aa, Artificial
  framework sequence
WGQGTPVTVSS

SEQ ID NO: 2482 - protein, 11 aa, Artificial
  framework sequence
RGQGTQVTVSS

SEQ ID NO: 2483 - protein, 11 aa, Artificial
  framework sequence
WGQGTQVTVSS

SEQ ID NO: 2484 - protein, 11 aa, Artificial
  framework sequence
WGQGTQVTVSS

SEQ ID NO: 2485 - protein, 116 aa, Artificial
  Nanobody sequence
EVQLVESGGGLVQPGGSLRLSCEASALTSFSNYAMYWVRQAPGKALEWVSAISRAGSNTYYADSVKGRFTISRDNAKDTLYLQMNSLRSEDTGVYYCAVDSSGTWRGQGTQVTVSS

SEQ ID NO: 2486 - protein, 126 aa, Artificial
  Nanobody sequence
EVQLVESGGGLVQAGGSLRLSCVASERTFSSSAMGWFRQAPGKEREFVAAIGWSGGGFIHYGDSVKGRFTISADNGKNTVYLQMNSLKPEDTAVYYCAADSRLRGIALLKGSYDYRGQGTQVTVSS

SEQ ID NO: 2487 - protein, 123 aa, Artificial
  Nanobody sequence
EVQLVESGGGLVQPGGSLRLSCAASGFTVDYHGIAWFRQAPGKGPEGVSCIRNSDGRTYYADSVKGRFTISRDNAKNTVYLQMNSLKLEDTAIYYCATTTGRIGVNCVPSNTRGQGTQVTVSS

SEQ ID NO: 2488 - protein, 123 aa, Artificial
  Nanobody sequence
EVQLVESGGGLVQPGGSLRLSCAASGFTVDYHGIAWFRQAPGKGPEGVSCIRNSDGRTYYADSVKGRFTISRDNAKNTVYLQMNSLKPEDTAIYYCATTTGRIGVNCVPSNTRGQGTQVTVSS

SEQ ID NO: 2489 - protein, 125 aa, Artificial
  Nanobody sequence
EVQLVESGGGLVQAGGSLRLSCAASGRTISNYGMGWFRQAPGKEREFVAAISARSAMIGYSDSVKGRFTISRDNAKNTVYLQMNSLKPEDTAVYYCAADLNRRVPTARPQEYDGWGQGTQVTVSS

SEQ ID NO: 2490 - protein, 126 aa, Artificial
  Nanobody sequence
EVQLVESGGGLVQPGGSLRLSCAASGFTLDYLAIGWFRQAPGKEREGVSCVSSSGQYTYYADSVKGRFTISRDNAESTVYLQMNSLKPEDTAVYYCATDPECYRVRGYYNGEYDYWGQGTQVTVSS

SEQ ID NO: 2491 - protein, 121 aa, Artificial
  Nanobody sequence
EVQLVESGGGLVQAGGSLRLSCAASGRTFSIYAMGWFRQAPGKEREFVAAITWIGDSTYYADSVKGRFTIARDNAKNTVYLQMNSLKPEDTAVYYCAAEREATMTLNFDSWGQGTQVTVSS

SEQ ID NO: 2492 - protein, 121 aa, Artificial
  Nanobody sequence
EVQLVESGGGLVQAGGSLRLSCAASGRSISSYAMGWFRQAPGKEREFVATITWSGGSTYYADSVKGRFTISRDNAKNVVYLQMNNLKPEDTAVYYCAADLSSGLDVDFGSWGQGTQVTVSS

SEQ ID NO: 2493 - protein, 121 aa, Artificial
  Nanobody sequence
EVQLVESGGGLVQAGGSLRLSCAASGRTFSINALGWFRQAPGKEREFVAAVNWSGGNTYYADSVKGRFTISKDNAKNTVYLQMNSLKPDDTAVYYCAADEYGGISVDFGSWGQGTRVTVSS

SEQ ID NO: 2494 - protein, 121 aa, Artificial
  Nanobody sequence
EVQLVESGGGLVQAGGSLRLSCAASGQTFSIHAMGWFRQAPGKEREFVAHISWSGGSTYYADSVKGRFAISRDNAKNTVYLQMNSLKPEDTAVYYCAADDMRELVTTFHYWGQGTQVTVSS

SEQ ID NO: 2495 - protein, 122 aa, Artificial
  Nanobody sequence
EVQLVESGGGLVQAGGSLRLSCAASGGTFSSYAMGWFRQAPGKERDFVAAIDWSGSTTTYADSVKGRFTISRDNAKNTVYLQMNSLKPEDTAVYYCAADMSHSPIEIDFGSWGQGTQVTVSS

SEQ ID NO: 2496 - protein, 122 aa, Artificial
  Nanobody sequence
EVQLVESGGGLVQAGGSLRLSCAASGGTFSSYAIGWFRQAPGKEREFVAAITWIERSTYYADSVKGRFTISRDNAKNTVYLQMNSLEPEDTAVYYCGADDRGDLMSVDFRSWGQGTQVTVSS

SEQ ID NO: 2497 - protein, 121 aa, Artificial
  Nanobody sequence
EVQLVESGGGLVQAGGSLRLSCAASGRTFSIYYMGWFRQAPGKEREFVAAITWIGGDTYYADSVKGRFTISRDNAKNTVYLQMNSLKPEDTAVYYCAVDDRTNMSVDFGSWGQGTQVTVSS

SEQ ID NO: 2498 - protein, 122 aa, Artificial
  Nanobody sequence
EVQLVESGGGLVQAGGSLRLSCAASGRSFSDYAMGWFRQTPGKEREFVAAISWSDGSTYYANSVKGRFTTSRDNAKNTVYLQMNNLKPEDTAVYYCAARRLVYYSDPKYDYWGQGTQVTVSS

SEQ ID NO: 2499 - protein, 124 aa, Artificial
  Nanobody sequence
EVQLVESGGGLVQAGGSLRLSCAASGRTFSVYAMGWFRQAPGKEREFVAAITWSGGETYYANSVKGRFTISRDNAKNTVYLQMSGLKPEDTAVYYCAADPSSDLVTVFGDSASWGQGTQVTVSS

SEQ ID NO: 2500 - protein, 123 aa, Artificial
  Nanobody sequence
EVQLVESGGGLVQAGGSLRLSCAASDRTFSSYAMAWFRQAPGKEREFVAQIIWSGGSTYYADSVKGRFTISGDNAKNTVYLQMNRLKPEDTAVYYCAADSGRTDWTADLYDYWGQGTQVTVSS

SEQ ID NO: 2501 - protein, 127 aa, Artificial
  Nanobody sequence
EVQLVESGGGSVQTGGSLRLSCAASGLTPSFSLYNMAWFRQAPGKEREFVASITWSGTSTSYLDSVKGRFIISRDNAKNTVYLQMNILKPEDTAVYYCAARARFAGTSMTPGGYVYWGQGTQVTVSS

SEQ ID NO: 2502 - protein, 129 aa, Artificial
  Nanobody sequence
EVQLVESGGGLVQAGGSLRLSCAVSGDTFSVYGMGWFRQAPGMEREFVAGISWNAGITAYTDTLKGRFTISRDRAKNTMYLQMNSLQPEDTAVYYCAADVTRHYIATRSKVDASMYDYWGQGTQVTVSS

SEQ ID NO: 2503 - protein, 124 aa, Artificial
  Nanobody sequence
EVQLVESGGGSVQAGGSLRLSCVASGLYFNGNGLGWFRQAPGKEREFVAAIAWNGARINYADSVKGRFTVSRDNIKNTVYLQMNSLKPEDTAVYYCASARSGYASISINEYDYWGQGTQVTVSS

SEQ ID NO: 2504 - protein, 129 aa, Artificial
  Nanobody sequence
EVQLVESGGGLVQPGGSLRLSCAASGFSLDYTAIGWFRQAPGKEREVVSCFTSVPGSTYHADSVKGRFTIASDNAKNTVYLQMNDLKPEDTAVYYCATDAQTYYSGSYCGRTPQEYPYWGQGTQVTVSS

SEQ ID NO: 2505 - protein, 122 aa, Artificial
  Nanobody sequence
EVQLVESGGGLVQAGASLRLSCAASGRTFRSYNMGWLRQAPGKEREFVATISWNAGIPYYADSVKGRFTISRDNAKNTVYLQMNSLKPEDTAVYYCAASNSWSSSARFYDYWGQGTQVTVSS

SEQ ID NO: 2506 - protein, 126 aa, Artificial
  Nanobody sequence
EVQLVESGGGLVPPGGSLRLSCAASGFTFSSYAMSWVRRAPGRGLEWISSISSGSDTTHVAGSVRGRFTISRDNAKNTLYLQMNSLKPDDTAVYYCVRAYDSIVPSPTQRTNYEYRGQGTQVTVSS

SEQ ID NO: 2507 - protein, 128 aa, Artificial
  Nanobody sequence
EVQLVESGGGLVQAGGSLRLSCAASGSIFSINGMGWFRQAPGKEREFVSGINWSGSGNTYHADSVKGRATISRDNAKNTVYLQMNSLKPEDTAVYYCAASERTYYSSSYYYRRFYDYWGQGTQVTVSS

SEQ ID NO: 2508 - protein, 125 aa, Artificial
  Nanobody sequence
EVQLVESGGGLVQAGGSLRLSCAASGRTFSTYPMGYFRQAPGKERELVAAISRGGGSTYYEDSVKGRFTISRDNAKNTVYLQMNSLKPEDTAVYYCAVQLVGDSVSSYTRHYGYWGPGAQVTVSS

SEQ ID NO: 2509 - protein, 125 aa, Artificial
  Nanobody sequence
EVQLVESGGGLVQAGGSLRLSCAASGRTFNNYLVGWFRQAPGKEREFVAAVRWEYGITEYADSVKGRFTISRDNAKNTVYLQMSSLRPEETAVYYCAAGTVRRSKFSNPIDYDYWGQGTQVTVSS

SEQ ID NO: 2510 - protein, 123 aa, Artificial
  Nanobody sequence
EVQLVESGGGLVQAGGSLRLSCAASGRTFSGYDMGWFRQAPGKEREFVAQISRHNSNTYYADAVKGRFTISRDNAKNTVSLQMNSLKPEDTAVYYCAIGSLFPSSRERDYDYWGQGTQVTVSS

SEQ ID NO: 2511 - protein, 126 aa, Artificial
  Nanobody sequence
EVQLVESGGGLVQAGGSLRLSCASSGRTFSIYARGWFRQAPGKEREFVAAIRSGLTTYSDSVKGRFTISRDIAKNTVFLQMNSLKSEDTAVYYCAAAVNYFTDFTDYSKRDSYDYWGQGTQVTVSS

SEQ ID NO: 2512 - protein, 123 aa, Artificial
  Nanobody sequence
EVQLVESGGGLVQAGGSLRLSCAASGRTFSWSAVGWFRQAPGKEREFVAAIRWSGGSPYYADSVKDRFTISRDNAKNTVYLQMNSLRPEDTAVYLCGETSLFPTSRGSHYDTWGQGTQVTVSS

SEQ ID NO: 2513 - protein, 123 aa, Artificial
  Nanobody sequence
EVQLVESGGGLVQAGGSLRLSCAASGRTFSSDAVGWFRQAPGLERVFVAAIRWSGGSAYYADSAKGRFTISRDNAKNTVYLQMNSLKPEDTAVYYCGATSLFPSSRGSHYDSWGQGTQVTVSS

SEQ ID NO: 2514 - protein, 122 aa, Artificial
  Nanobody sequence
EVQLVESGGELVQAGGSLRLSCAASGSIVSISAMAWYRQAPGKQRERVATITRGGTPDYADSAKDRFTISRDNAKNTVSLQMNNLKPEDTAVYYCKAALRTPTHDYNYYDYWGQGTQVTVSS

SEQ ID NO: 2515 - protein, 124 aa, Artificial
  Nanobody sequence
EVQLVESGGGLVQAGDSLRLSCAASGRSFSNDAMGWFRQAPGKERSFVAAINWSGELTGYAGSVKGRFTISRDGVENMVFLQMNSLVPEDTGVYYCAAVEGRDYYRGAQYYDYWGQGTQVTVSS

SEQ ID NO: 2516 - protein, 123 aa, Artificial
  Nanobody sequence
EVQLVESGGGVVQAGESLRLSCAASGYNVKDYEMGWFRQAPGMEREFAAAISWRGSSTYYADSVKGRFTISRDNAKNTVYLQMSSLKPEDTAVYYCAAGRLYPSSRSRDYDYWGQGTQVTVSS

SEQ ID NO: 2517 - protein, 123 aa, Artificial; identical to SEQ ID NO: 2516
  Nanobody sequence

SEQ ID NO: 2518 - protein, 123 aa, Artificial
  Nanobody sequence
EVQLVESGGGVVQAGESLRLSCAASGYNFKDHDLGWFRQAPGMEREFVAAISWRGSSTYYADSVKGRFTISRDNAKNTVYLQMSSLKPEDTAVYYCAAGRLYPSSRSRDYDYWGQGTQVTVSS

SEQ ID NO: 2519 - protein, 123 aa, Artificial
  Nanobody sequence
EVQPVESGGGVVQAGESLRLSCAASGRSFSDYEMGWFRQAPGTEREFVATINRRGSSTYYADSVKGRFTISRDNAKNTVYLQMSSLKSEDTAVYYCAAGWLYPSSRSRDYDYWGQGTQVTVSS

SEQ ID NO: 2520 - protein, 123 aa, Artificial
  Nanobody sequence
EVQLVESGGGVVQAGESLRLSCAASGRSFSNYEMGWFRQAPGTEREFVGSINRRGSSTYYADSVKGRFTISRDNAKNTVYLQMSSLKPEDTAVYYCAAGWLYPSSRSRDYDYWGQGTQVTVSS

SEQ ID NO: 2521 - protein, 123 aa, Artificial
  Nanobody sequence
EVQLVESGGGVVQAGETLRLSCAASGRSFSNYEMGWFRQAPGTEREFVGTINRRGSSTYYTDSVKGRFSISRDNAKNTMYLQMSSLKPEDTAVYYCAAGWLFPSSRSRDYDYWGQGTQVTVSS

SEQ ID NO: 2522 - protein, 123 aa, Artificial
  Nanobody sequence
EVQLVESGGGVVQAGESLRLSCAASGRSFSNYEMGWFRQAPGTEREFVGAINRRGSSTYYADSAKGRFTISRDNAKNTVFLQMSSLKPEDTAVYYCAAGWLFPSSRSRDYDYWGQGTQVTVSS

SEQ ID NO: 2523 - protein, 122 aa, Artificial
  Nanobody sequence
EVQLVESGGGVVQAGESLRLSCAASGRTFSNYEMGWFRQAPGTEREFVASISRRYSTYYPDSVKGRFTISRDNAKNTVYLQMSSLKPDDTAVYYCAAGQLFPSSRSRDYDYWGQGTQVTVSS

SEQ ID NO: 2524 - protein, 123 aa, Artificial; identical to SEQ ID NO: 1994
  Nanobody sequence

SEQ ID NO: 2525 - protein, 123 aa, Artificial
  Nanobody sequence
EVQLVESGGGLVQAGGSLRLSCAASGSIFSINAMGWFRQAPGKERQFVAAINWSTGSTYYSDSVKGRFTISRDNAKNTVYLQMNSLKPEDTAVYFCASGYLFPSSRGSQYDYWGQGTQVTVSS

SEQ ID NO: 2526 - protein, 124 aa, Artificial
  Nanobody sequence
EVQLVESGGGSVQAGGSLRLSCKVSGIMFSDKGMGWFRQAPGKERETVAATNWSGGSTYYADSVKGRFTISRDNYKNTLHLQMASLKPEDTGIYYCAAAGDSWNSRRIEDYDYWGQGTPVTVSS

SEQ ID NO: 2527 - protein, 114 aa, Artificial
  Nanobody sequence
EVQLVESGGGLVQPGGSLRLSCAASGFTFSSSVMFWLRQAPGKGLEWLSTIKPTGSTIYPGSGKGRFTISRDNAKNTLYLQINNLKPEDTALYYCARDIGGTVRGQGTQVTVSS

SEQ ID NO: 2528 - protein, 125 aa, Artificial
  Nanobody sequence
EVQLVESGGGLVQAGGSLRLSCAASGIIFSDNTMGWFRQAPGKEREFVAAIAGRGSRLNYADSVKGRFTISRDNTKNTVYLQMNSLKPEDTAIYYCAAKPYGRVYYTEGSNYDYWGQGTQVTVSS

SEQ ID NO: 2529 - protein, 128 aa, Artificial
  Nanobody sequence
EVQLVESGGGLVQAGGSLRLSCAASGFTFSSYWMYWFRQAPGKGLEWVSSINSGSGNTYYADSVKGRFTISRDNAKNTVYLQMNSLKPEDTAIYYCAAARTFYSRTYYPVNRDEYDYWGQGTQVTVSS

SEQ ID NO: 2530 - protein, 267 aa, Artificial
  Nanobody construct
EVQLVESGGGLVQAGGSLRLSCAASGSIFNFNYMGWFRQAPGKEREFVAAIRWSGSSTYYADSVKGRFTISRDDAKNTVALQMNSLKPEDTAIYYCALRKGIPYSTSDRVIKGVNDYDYWGQGTQVTVSSGGGGSGGGSEVQLVESGGGLVQPGGSLRLSCIASGLPFSTKSMGWFRQAPGKEREFVARISPGGTSRYYGDFVKGRFAISRDNAKNTTWLQMNSLKAEDTAVYYCASGERSTYIGSNYYRTNEYDYWGTGTLVTVSS

SEQ ID NO: 2531 - protein, 268 aa, Artificial
  Nanobody construct
EVQLVESGGGLVQAGGSLRLSCAASGSIFNFNYMGWFRQAPGKEREFVAAIRWSGSSTYYADSVKGRFTISRDDAKNTVALQMNSLKPEDTAIYYCALRKGIPYSTSDRVIKGVNDYDYWGQGTQVTVSSGGGGSGGGSEVQLVESGGGLVQAGGSLTLSCAVSGLTFNNYAMGWFRQVPGKEREFVAAISRSGLRTFYSDSVKGRFTISRDSAKSTVYVQMNNLKPEDTAVYFCAADRRTYYSEGPSLTDTLRYDYWGQGTQVTVSS

SEQ ID NO: 2532 - protein, 264 aa, Artificial
  Nanobody construct
EVQLVESGGGLVQAGGSLRLSCAASGSIFNFNYMGWFRQAPGKEREFVAAIRWSGSSTYYADSVKGRFTISRDDAKNTVALQMNSLKPEDTAIYYCALRKGIPYSTSDRVIKGVNDYDYWGQGTQVTVSSGGGGSGGGSEVQLVESGGGLVQPGGSLRLSCAASGFTLDDYAIAWFRQAPGKEREGVSGIDSGDGSAYYADSVKGRFTISSDNAKNTVYLQMNSLRPEDTAVYYCARVRTGWGLNAPDYAMDYWGKGTQVTVSS

SEQ ID NO: 2533 - protein, 391 aa, Artificial
  Nanobody construct
EVQLVESGGGLVQAGGSLRLSCAASGSIFNFNYMGWFRQAPGKEREFVAAIRWSGSSTYYADSVKGRFTISRDDAKNTVALQMNSLKPEDTAIYYCALRKGIPYSTSDRVIKGVNDYDYWGQGTQVTVSSGGGGSGGGSEVQLVESGGGLVQPGNSLRLSCAASGFTFRSFGMSWVRQAPGKEPEWVSSISGSGSDTLYADSVKGRFTISRDNAKTTLYLQMNSLKPEDTAVYYCTIGGSLSRSSQGTQVTVSSGGGGSGGGSEVQLVESGGGLVQPGGSLRLSCIASGLPFSTKSMGWFRQAPGKEREFVARISPGGTSRYYGDFVKGRFAISRDNAKNTTWLQMNSLKAEDTAVYYCASGERSTYIGSNYYRTNEYDYWGTGTQVTVSS

SEQ ID NO: 2534 - protein, 275 aa, Artificial
  Nanobody construct
EVQLVESGGGLVQAGGSLRLSCAASGSIFNFNYMGWFRQAPGKEREFVAAIRWSGSSTYYADSVKGRFTISRDDAKNTVALQMNSLKPEDTAIYYCALRKGIPYSTSDRVIKGVNDYDYWGQGTQVTVSSGGGGSGGGGSGGGGSGGGGSEVQLVESGGGLVQPGGSLRLSCAASGFTLDDYAIAWFRQAPGKEREGVSGIDSGDGSAYYADSVKGRFTISSDNAKNTVYLQMNSLRPEDTAVYYCARVRTGWGLNAPDYAMDYWGKGTQVTVSS

SEQ ID NO: 2535 - protein, 391 aa, Artificial; identical to SEQ ID NO: 2533
  Nanobody construct

SEQ ID NO: 2536 - protein, 392 aa, Artificial
  Nanobody construct
EVQLVESGGGLVQAGGSLRLSCAASGSIFNFNYMGWFRQAPGKEREFVAAIRWSGSSTYYADSVKGRFTISRDDAKNTVALQMNSLKPEDTAIYYCALRKGIPYSTSDRVIKGVNDYDYWGQGTQVTVSSGGGGSGGGSEVQLVESGGGLVQPGNSLRLSCAASGFTFRSFGMSWVRQAPGKEPEWVSSISGSGSDTLYADSVKGRFTISRDNAKTTLYLQMNSLKPEDTAVYYCTIGGSLSRSSQGTQVTVSSGGGGSGGGSEVQLVESGGGLVQAGGSLTLSCAVSGLTFNNYAMGWFRQVPGKEREFVAAISRSGLRTFYSDSVKGRFTISRDSAKSTVYVQMNNLKPEDTAVYFCAADRRTYYSEGPSLTDTLRYDYWGQGTQVTVSS

SEQ ID NO: 2537 - protein, 386 aa, Artificial
  Nanobody construct
EVQLVESGGGLVQAGGSLRLSCAASGRIFSLPASGNIFNLLTIAWHRQAPGMQRELVATINSGSRTNYADSVKGRFTISRDNAQKTVYLQMNNLKPEDTAVYYCQTSGSGSPNFWGQGTQVTVSSGGGGSGGGSEVQLVESGGGLVQPGNSLRLSCAASGFTFRSFGMSWVRQAPGKEPEWVSSISGSGSDTLYADSVKGRFTISRDNAKTTLYLQMNSLKPEDTAVYYCTIGGSLSRSSQGTQVTVSSGGGGSGGGSEVQLVESGGGLVQPGGSLRLSCIASGLPFSTKSMGWFRQAPGKEREFVARISPGGTSRYYGDFVKGRFAISRDNAKNTTWLQMNSLKAEDTAVYYCASGERSTYIGSNYYRTNEYDYWGTGTQVTVSS

SEQ ID NO: 2538 - protein, 388 aa, Artificial
  Nanobody construct
EVQLVESGGGLVQAGGSLRLSCAASGSIFNFNYMGWFRQAPGKEREFVAAIRWSGSSTYYADSVKGRFTISRDDAKNTVALQMNSLKPEDTAIYYCALRKGIPYSTSDRVIKGVNDYDYWGQGTQVTVSSGGGGSGGGSEVQLVESGGGLVQPGNSLRLSCAASGFTFRSFGMSWVRQAPGKEPEWVSSISGSGSDTLYADSVKGRFTISRDNAKTTLYLQMNSLKPEDTAVYYCTIGGSLSRSSQGTQVTVSSGGGGSGGGSEVQLVESGGGLVQPGGSLRLSCAASGFTLDDYAIAWFRQAPGKEREGVSGIDSGDGSAYYADSVKGRFTISSDNAKNTVYLQMNSLRPEDTAVYYCARVRTGWGLNAPDYAMDYWGKGTQVTVSS

SEQ ID NO: 2539 - protein, 292 aa, Artificial
  Nanobody construct
EVQLVESGGGLVQAGGSLRLSCAASGRIFSLPASGNIFNLLTIAWHRQAPGMQRELVATINSGSRTNYADSVKGRFTISRDNAQKTVYLQMNNLKPEDTAVYYCQTSGSGSPNFWGQGTQVTVSSGGGGSGGGGSGGGGSGGGGSGGGGSGGGGSGGGGSEVQLVESGGGLVQPGGSLRLSCIASGLPFSTKSMGWFRQAPGKEREFVARISPGGTSRYYGDFVKGRFAISRDNAKNTTWLQMNSLKAEDTAVYYCASGERSTYIGSNYYRTNEYDYWGTGTQVTVSSGGGC

SEQ ID NO: 2540 - protein, 294 aa, Artificial
  Nanobody construct
EVQLVESGGGLVQAGGSLRLSCAASGSIFNFNYMGWFRQAPGKEREFVAAIRWSGSSTYYADSVKGRFTISRDDAKNTVALQMNSLKPEDTAIYYCALRKGIPYSTSDRVIKGVNDYDYWGQGTQVTVSSGGGGSGGGGSGGGGSGGGGSGGGGSGGGGSGGGGSEVQLVESGGGLVQPGGSLRLSCAASGFTLDDYAIAWFRQAPGKEREGVSGIDSGDGSAYYADSVKGRFTISSDNAKNTVYLQMNSLRPEDTAVYYCARVRTGWGLNAPDYAMDYWGKGTLVTVSSGGGC

SEQ ID NO: 2541 - protein, 873 aa, Artificial
  Nanobody construct
EVQLVESGGGLVQAGGSLRLSCAASGRIFSLPASGNIFNLLTIAWHRQAPGMQRELVATINSGSRTNYADSVKGRFTISRDNAQKTVYLQMNNLKPEDTAVYYCQTSGSGSPNFWGQGTQVTVSSGGGGSGGGGSGGGGSGGGGSGGGGSGGGGSGGGGSEVQLVESGGGLVQPGGSLRLSCIASGLPFSTKSMGWFRQAPGKEREFVARISPGGTSRYYGDFVKGRFAISRDNAKNTTWLQMNSLKAEDTAVYYCASGERSTYIGSNYYRTNEYDYWGTGTQVTVSSDAHKSEVAHRFKDLGEENFKALVLIAFAQYLQQCPFEDHVKLVNEVTEFAKTCVADESAENCDKSLHTLFGDKLCTVATLRETYGEMADCCAKQEPERNECFLQHKDDNPNLPRLVRPEVDVMCTAFHDNEETFLKKYLYEIARRHPYFYAPELLFFAKRYKAAFTECCQAADKAACLLPKLDELRDEGKASSAKQRLKCASLQKFGERAFKAWAVARLSQRFPKAEFAEVSKLVTDLTKVHTECCHGDLLECADDRADLAKYICENQDSISSKLKECCEKPLLEKSHCIAEVENDEMPADLPSLAADFVESKDVCKNYAEAKDVFLGMFLYEYARRHPDYSVVLLLRLAKTYETTLEKCCAAADPHECYAKVFDEFKPLVEEPQNLIKQNCELFEQLGEYKFQNALLVRYTKKVPQVSTPTLVEVSRNLGKVGSKCCKHPEAKRMPCAEDYLSVVLNQLCVLHEKTPVSDRVTKCCTESLVNRRPCFSALEVDETYVPKEFNAETFTFHADICTLSEKERQIKKQTALVELVKHKPKATKEQLKAVMDDFAAFVEKCCKADDKETCFAEEGKKLVAASQAALGL

SEQ ID NO: 2542 - protein, 412 aa, Artificial
  Nanobody construct
EVQLVESGGGLVQAGGSLRLSCAASGRIFSLPASGNIFNLLTIAWHRQAPGMQRELVATINSGSRTNYADSVKGRFTISRDNAQKTVYLQMNNLKPEDTAVYYCQTSGSGSPNFWGQGTQVTVSSGGGGSGGGGSGGGGSGGGGSGGGGSGGGGSGGGGSEVQLVESGGGLVQPGGSLRLSCIASGLPFSTKSMGWFRQAPGKEREFVARISPGGTSRYYGDFVKGRFAISRDNAKNTTWLQMNSLKAEDTAVYYCASGERSTYIGSNYYRTNEYDYWGTGTQVTVSSGGGGSGGGSEVQLVESGGGLVQPGNSLRLSCAASGFTFRSFGMSWVRQAPGKEPEWVSSISGSGSDTLYADSVKGRFTISRDNAKTTLYLQMNSLKPEDTAVYYCTIGGSLSRSSQGTQVTVSS

SEQ ID NO: 2543 - protein, 386 aa, Artificial
  Nanobody construct
EVQLVESGGGLVQAGGSLRLSCAASGRIFSLPASGNIFNLLTIAWYRQAPGMQRELVATINSGSRTNYADSVKGRFTISRDNAQKTVYLQMNNLKPEDTAVYYCQTSGSGSPNFWGQGTQVTVSSGGGGSGGGSEVQLVESGGGLVQPGNSLRLSCAASGFTFRSFGMSWVRQAPGKEPEWVSSISGSGSDTLYADSVKGRFTISRDNAKTTLYLQMNSLKPEDTAVYYCTIGGSLSRSSQGTQVTVSSGGGGSGGGSEVQLVESGGGLVQAGGSLRLSCAASGRTLSSYAMGWFRQAPGKEREFVARISQGGTAIYYADSVKGRFTISRDNAKNTVYLQMNSLKPEDTAVYYCAKDPSPYYRGSAYLLSGSYDSWGQGTQVTVSS

SEQ ID NO: 2544 - protein, 386 aa, Artificial
  Nanobody construct
EVQLVESGGGLVQAGGSLRLSCAASGRIFSLPASGNIFNLLTIAWYRQAPGKQRELVATINSGSRTNYADSVKGRFTISRDNAQKTVYLQMNNLKPEDTAVYYCQTSGSGSPNFWGQGTQVTVSSGGGGSGGGSEVQLVESGGGLVQPGNSLRLSCAASGFTFRSFGMSWVRQAPGKEPEWVSSISGSGSDTLYADSVKGRFTISRDNAKTTLYLQMNSLKPEDTAVYYCTIGGSLSRSSQGTQVTVSSGGGGSGGGSEVQLVESGGGLVQAGGSLRLSCAASGRTLSSYAMGWFRQAPGKEREFVARISQGGTAIYYADSVKGRFTISRDNAKNTVYLQMNSLKPEDTAVYYCAKDPSPYYRGSAYLLSGSYDSWGQGTQVTVSS

SEQ ID NO: 2545 - protein, 285 aa, Artificial
  Nanobody construct
EVQLVESGGGLVQPGGSLRLSCAASGFTLDDYAIAWFRQAPGKEREGVSGIDSGDGSAYYADSVKGRFTISSDNAKNTVYLQMNSLRPEDTAVYYCARVRTGWGLNAPDYAMDYWGKGTQVTVSSGGGGSGGGGSGGGGSGGGGSGGGGSGGGGSGGGGSEVQLVESGGGLVQAGGSLRLSCAASGRIFSLPASGNIFNLLTIAWHRQAPGMQRELVATINSGSRTNYADSVKGRFTISRDNAQKTVYLQMNNLKPEDTAVYYCQTSGSGSPNFWGQGTQVTVSS

SEQ ID NO: 2546 - protein, 386 aa, Artificial
  Nanobody construct
EVQLVESGGGLVQAGGSLRLSCAASGRIFSLPASGNIFNLLTIAWHRQAPGMQRELVATINSGSRTNYADSVKGRFTISRDNAQKTVYLQMNNLKPEDTAVYYCQTSGSGSPNFWGQGTQVTVSSGGGGSGGGSEVQLVESGGGLVQPGNSLRLSCAASGFTFRSFGMSWVRQAPGKEPEWVSSISGSGSDTLYADSVKGRFTISRDNAKTTLYLQMNSLKPEDTAVYYCTIGGSLSRSSQGTQVTVSSGGGGSGGGSEVQLVESGGGLVQAGGSLRLSCAASGRTLSSYAMGWFRQAPGKEREFVARISQGGTAIYYADSVKGRFTISRDNAKNTVYLQMNSLKPEDTAVYYCAKDPSPYYRGSAYLLSGSYDSWGQGTQVTVSS

SEQ ID NO: 2547 - protein, 386 aa, Artificial; identical to SEQ ID NO: 2546
  Nanobody construct

SEQ ID NO: 2548 - protein, 250 aa, Artificial
  Nanobody construct
EVQLVESGGGLVQPGGSLRLSCAASGFTLDYLAIGWFRQAPGKEREGVSCVSSSGQYTYYADSVKGRFTISRDNAESTVYLQMNSLKPEDTAVYYCATDPECYRVRGYYNGEYDYWGQGTQVTVSSGGGGSGGGSEVQLVESGGGLVQPGNSLRLSCAASGFTFRSFGMSWVRQAPGKEPEWVSSISGSGSDTLYADSVKGRFTISRDNAKTTLYLQMNSLKPEDTAVYYCTIGGSLSRSSQGTQVTVSS

SEQ ID NO: 2549 - protein, 384 aa, Artificial
  Nanobody construct
EVQLVESGGGLVQPGGSLRLSCAASGFTLDYLAIGWFRQAPGKEREGVSCVSSSGQYTYYADSVKGRFTISRDNAESTVYLQMNSLKPEDTAVYYCATDPECYRVRGYYNGEYDYWGQGTQVTVSSGGGGSGGGSEVQLVESGGGLVQPGNSLRLSCAASGFTFRSFGMSWVRQAPGKEPEWVSSISGSGSDTLYADSVKGRFTISRDNAKTTLYLQMNSLKPEDTAVYYCTIGGSLSRSSQGTQVTVSSGGGGSGGGSEVQLVESGGGLVQPGGSLRLSCAASGFTLDDYAIAWFRQAPGKEREGVSGIDSGDGSAYYADSVKGRFTISSDNAKNTVYLQMNSLRPEDTAVYYCARVRTGWGLNAPDYAMDYWGKGTQVTVSS

SEQ ID NO: 2550 - protein, 388 aa, Artificial
  Nanobody construct
EVQLVESGGGLVQPGGSLRLSCAASGFTLDYLAIGWFRQAPGKEREGVSCVSSSGQYTYYADSVKGRFTISRDNAESTVYLQMNSLKPEDTAVYYCATDPECYRVRGYYNGEYDYWGQGTQVTVSSGGGGSGGGSEVQLVESGGGLVQPGNSLRLSCAASGFTFRSFGMSWVRQAPGKEPEWVSSISGSGSDTLYADSVKGRFTISRDNAKTTLYLQMNSLKPEDTAVYYCTIGGSLSRSSQGTQVTVSSGGGGSGGGSEVQLVESGGGLVQAGGSLRLSCAVSGDTFSVYGMGWFRQAPGMEREFVAGISWNAGITAYTDTLKGRFTISRDRAKNTMYLQMNSLQPEDTAVYYCAADVTRHYIATRSKVDASMYDYWGQGTQVTVSS

SEQ ID NO: 2551 - protein, 390 aa, Artificial
  Nanobody construct
EVQLVESGGGLVQPGGSLRLSCAASGFTLDYLAIGWFRQAPGKEREGVSCVSSSGQYTYYADSVKGRFTISRDNAESTVYLQMNSLKPEDTAVYYCATDPECYRVRGYYNGEYDYWGQGTQVTVSSGGGGSGGGSEVQLVESGGGLVQPGNSLRLSCAASGFTFRSFGMSWVRQAPGKEPEWVSSISGSGSDTLYADSVKGRFTISRDNAKTTLYLQMNSLKPEDTAVYYCTIGGSLSRSSQGTQVTVSSGGGGSGGGGSGGGGSEVQLVESGGGLVQPGGSLRLSCAASGFTLDDYAIAWFRQAPGKEREGVSGIDSGDGSAYYADSVKGRFTISSDNAKNTVYLQMNSLRPEDTAVYYCARVRTGWGLNAPDYAMDYWGKGTQVTVSS

SEQ ID NO: 2552 - protein, 390 aa, Artificial
  Nanobody construct
EVQLVESGGGLVQPGGSLRLSCAASGFTLDDYAIAWFRQAPGKEREGVSGIDSGDGSAYYADSVKGRFTISSDNAKNTVYLQMNSLRPEDTAVYYCARVRTGWGLNAPDYAMDYWGKGTQVTVSSGGGGSGGGGSGGGGSEVQLVESGGGLVQPGNSLRLSCAASGFTFRSFGMSWVRQAPGKEPEWVSSISGSGSDTLYADSVKGRFTISRDNAKTTLYLQMNSLKPEDTAVYYCTIGGSLSRSSQGTQVTVSSGGGGSGGGSEVQLVESGGGLVQPGGSLRLSCAASGFTLDYLAIGWFRQAPGKEREGVSCVSSSGQYTYYADSVKGRFTISRDNAESTVYLQMNSLKPEDTAVYYCATDPECYRVRGYYNGEYDYWGQGTQVTVSS

SEQ ID NO: 2553 - protein, 380 aa, Artificial
  Nanobody construct
EVQLVESGGGLVQAGGSLRLSCAASGGTFSSYAMGWFRQAPGKERDFVAAIDWSGSTTTYADSVKGRFTISRDNAKNTVYLQMNSLKPEDTAVYYCAADMSHSPIEIDFGSWGQGTQVTVSSGGGGSGGGSEVQLVESGGGLVQPGNSLRLSCAASGFTFRSFGMSWVRQAPGKEPEWVSSISGSGSDTLYADSVKGRFTISRDNAKTTLYLQMNSLKPEDTAVYYCTIGGSLSRSSQGTQVTVSSGGGGSGGGSEVQLVESGGGLVQPGGSLRLSCAASGFTLDDYAIAWFRQAPGKEREGVSGIDSGDGSAYYADSVKGRFTISSDNAKNTVYLQMNSLRPEDTAVYYCARVRTGWGLNAPDYAMDYWGKGTQVTVSS

SEQ ID NO: 2554 - protein, 380 aa, Artificial
  Nanobody construct
EVQLVESGGGLVQPGGSLRLSCAASGFTLDDYAIAWFRQAPGKEREGVSGIDSGDGSAYYADSVKGRFTISSDNAKNTVYLQMNSLRPEDTAVYYCARVRTGWGLNAPDYAMDYWGKGTQVTVSSGGGGSGGGSEVQLVESGGGLVQPGNSLRLSCAASGFTFRSFGMSWVRQAPGKEPEWVSSISGSGSDTLYADSVKGRFTISRDNAKTTLYLQMNSLKPEDTAVYYCTIGGSLSRSSQGTQVTVSSGGGGSGGGSEVQLVESGGGLVQAGGSLRLSCAASGGTFSSYAMGWFRQAPGKERDFVAAIDWSGSTTTYADSVKGRFTISRDNAKNTVYLQMNSLKPEDTAVYYCAADMSHSPIEIDFGSWGQGTQVTVSS

SEQ ID NO: 2555 - protein, 400 aa, Artificial
  Nanobody construct
EVQLVESGGGLVQPGGSLRLSCAASGFTLDYLAIGWFRQAPGKEREGVSCVSSSGQYTYYADSVKGRFTISRDNAESTVYLQMNSLKPEDTAVYYCATDPECYRVRGYYNGEYDYWGQGTQVTVSSGGGGSGGGGSGGGGSEVQLVESGGGLVQPGNSLRLSCAASGFTFRSFGMSWVRQAPGKEPEWVSSISGSGSDTLYADSVKGRFTISRDNAKTTLYLQMNSLKPEDTAVYYCTIGGSLSRSSQGTQVTVSSGGGGSGGGGSGGGGSEVQLVESGGGLVQAGGSLRLSCAVSGDTFSVYGMGWFRQAPGMEREFVAGISWNAGITAYTDTLKGRFTISRDRAKNTMYLQMNSLQPEDTAVYYCAADVTRHYIATRSKVDASMYDYWGQGTQVTVSS

SEQ ID NO: 2556 - protein, 396 aa, Artificial
  Nanobody construct
EVQLVESGGGLVQPGGSLRLSCAASGFTLDYLAIGWFRQAPGKEREGVSCVSSSGQYTYYADSVKGRFTISRDNAESTVYLQMNSLKPEDTAVYYCATDPECYRVRGYYNGEYDYWGQGTQVTVSSGGGGSGGGGSGGGGSEVQLVESGGGLVQPGNSLRLSCAASGFTFRSFGMSWVRQAPGKEPEWVSSISGSGSDTLYADSVKGRFTISRDNAKTTLYLQMNSLKPEDTAVYYCTIGGSLSRSSQGTQVTVSSGGGGSGGGGSGGGGSEVQLVESGGGLVQPGGSLRLSCAASGFTLDDYAIAWFRQAPGKEREGVSGIDSGDGSAYYADSVKGRFTISSDNAKNTVYLQMNSLRPEDTAVYYCARVRTGWGLNAPDYAMDYWGKGTQVTVSS

SEQ ID NO: 2557 - protein, 388 aa, Artificial
  Nanobody construct
EVQLVESGGGLVQAGGSLRLSCAVSGDTFSVYGMGWFRQAPGMEREFVAGISWNAGITAYTDTLKGRFTISRDRAKNTMYLQMNSLQPEDTAVYYCAADVTRHYIATRSKVDASMYDYWGQGTQVTVSSGGGGSGGGSEVQLVESGGGLVQPGNSLRLSCAASGFTFRSFGMSWVRQAPGKEPEWVSSISGSGSDTLYADSVKGRFTISRDNAKTTLYLQMNSLKPEDTAVYYCTIGGSLSRSSQGTQVTVSSGGGGSGGGSEVQLVESGGGLVQPGGSLRLSCAASGFTLDYLAIGWFRQAPGKEREGVSCVSSSGQYTYYADSVKGRFTISRDNAESTVYLQMNSLKPEDTAVYYCATDPECYRVRGYYNGEYDYWGQGTQVTVSS

SEQ ID NO: 2558 - protein, 396 aa, Artificial
  Nanobody construct
EVQLVESGGGLVQPGGSLRLSCAASGFTLDDYAIAWFRQAPGKEREGVSGIDSGDGSAYYADSVKGRFTISSDNAKNTVYLQMNSLRPEDTAVYYCARVRTGWGLNAPDYAMDYWGKGTQVTVSSGGGGSGGGGSGGGGSEVQLVESGGGLVQPGNSLRLSCAASGFTFRSFGMSWVRQAPGKEPEWVSSISGSGSDTLYADSVKGRFTISRDNAKTTLYLQMNSLKPEDTAVYYCTIGGSLSRSSQGTQVTVSSGGGGSGGGGSGGGGSEVQLVESGGGLVQPGGSLRLSCAASGFTLDYLAIGWFRQAPGKEREGVSCVSSSGQYTYYADSVKGRFTISRDNAESTVYLQMNSLKPEDTAVYYCATDPECYRVRGYYNGEYDYWGQGTQVTVSS

SEQ ID NO: 2559 - protein, 124 aa, Artificial
  Nanobody sequence
VQLVESGGGLVQAGGSLRLSCAASGRIFSLPASGNIFNLLTIAWYRQAPGMQRELVATINSGSRTNYADSVKGRFTISRDNAQKTVYLQMNNLKPEDTAVYYCQTSGSGSPNFWGQGTQVTVSS

SEQ ID NO: 2560 - protein, 125 aa, Artificial
  Nanobody sequence
EVQLVESGGGLVQAGGSLRLSCAASGRIFSLPASGNIFNLLTIAWHRQAPGKQRELVATINSGSRTNYADSVKGRFTISRDNAQKTVYLQMNNLKPEDTAVYYCQTSGSGSPNFWGQGTQVTVSS

SEQ ID NO: 2561 - protein, 125 aa, Artificial
  Nanobody sequence
EVQLVESGGGLVQAGGSLRLSCAASGRIFSLPASGNIFNLLTIAWYRQAPGKQRELVATINSGSRTNYADSVKGRFTISRDNAQKTVYLQMNNLKPEDTAVYYCQTSGSGSPNFWGQGTQVTVSS

SEQ ID NO: 2562 - protein, 125 aa, Artificial
  Nanobody sequence
EVQLVESGGGLVQPGGSLRLSCAASGRIFSLPASGNIFNLLTIAWYRQAPGMQRELVATINSGSRTNYADSVKGRFTISRDNAQKTLYLQMNNLRPEDTAVYYCQTSGSGSPNFWGQGTLVTVSS

SEQ ID NO: 2563 - protein, 125 aa, Artificial
  Nanobody sequence
EVQLVESGGGLVQPGGSLRLSCAASGRIFSLPASGNIFNLLTIAWYRQAPGKQRELVATINSGSRTNYADSVKGRFTISRDNAQKTLYLQMNNLRPEDTAVYYCQTSGSGSPNFWGQGTLVTVSS

SEQ ID NO: 2564 - protein, 125 aa, Artificial
  Nanobody sequence
EVQLVESGGGLVQPGGSLRLSCAASGRIFSLPASGNIFNLLTIAWYRQAPGMGRELVATINSGSRTNYADSVKGRFTISRDNAQKTLYLQMNNLRPEDTAVYYCQTSGSGSPNFWGQGTLVTVSS

SEQ ID NO: 2565 - protein, 125 aa, Artificial
  Nanobody sequence
EVQLVESGGGLVQPGGSLRLSCAASGRIFSLPASGNIFNLLTIAWYRQAPGMQRELVSTINSGSRTNYADSVKGRFTISRDNAQKTLYLQMNNLRPEDTAVYYCQTSGSGSPNFWGQGTLVTVSS

SEQ ID NO: 2566 - protein, 125 aa, Artificial
  Nanobody sequence
EVQLVESGGGLVQPGGSLRLSCAASGRIFSLPASGNIFNLLTIAWYRQAPGMQRELVATINSGSRTYYADSVKGRFTISRDNAQKTLYLQMNNLRPEDTAVYYCQTSGSGSPNFWGQGTLVTVSS

SEQ ID NO: 2567 - protein, 125 aa, Artificial
  Nanobody sequence
EVQLVESGGGLVQPGGSLRLSCAASGRIFSLPASGNIFNLLTIAWYRQAPGMQRELVATINSGSRTNYADSVKGRFTISRDNSQKTLYLQMNNLRPEDTAVYYCQTSGSGSPNFWGQGTLVTVSS

SEQ ID NO: 2568 - protein, 125 aa, Artificial
  Nanobody sequence
EVQLVESGGGLVQPGGSLRLSCAASGRIFSLPASGNIFNLLTIAWYRQAPGMQRELVATINSGSRTNYADSVKGRFTISRDNAKKTLYLQMNNLRPEDTAVYYCQTSGSGSPNFWGQGTLVTVSS

SEQ ID NO: 2569 - protein, 125 aa, Artificial
  Nanobody sequence
EVQLVESGGGLVQPGGSLRLSCAASGRIFSLPASGNIFNLLTIAWYRQAPGMQRELVATINSGSRTNYADSVKGRFTISRDNAQNTLYLQMNNLRPEDTAVYYCQTSGSGSPNFWGQGTLVTVSS

SEQ ID NO: 2570 - protein, 125 aa, Artificial
  Nanobody sequence
EVQLVESGGGLVQPGGSLRLSCAASGRIFSLPASGNIFNLLTIAWYRQAPGMQRELVATINSGSRTNYADSVKGRFTISRDNAQKTLYLQMNNLRPEDTAVYYCATSGSGSPNFWGQGTLVTVSS

SEQ ID NO: 2571 - protein, 125 aa, Artificial
  Nanobody sequence
EVQLVESGGGLVQPGGSLRLSCAASGRIFSLPASGNIFNLLTIAWYRQAPGMQRELVATINSGSRTNYADSVKGRFTISRDNAQKTLYLQMNSLRPEDTAVYYCQTSGSGSPNFWGQGTLVTVSS

SEQ ID NO: 2572 - protein, 125 aa, Artificial
  Nanobody sequence
EVQLLESGGGLVQPGGSLRLSCAASGRIFSLPASGNIFNLLTIAWYRQAPGKGRELVATINSGSRTNYADSVKGRFTISRDNSKKTLYLQMNSLRPEDTAVYYCQTSGSGSPNFWGQGTLVTVSS

SEQ ID NO: 2573 - protein, 125 aa, Artificial
  Nanobody sequence
EVQLLESGGGLVQPGGSLRLSCAASGRIFSLPASGNIFNLLTIAWYRQAPGKGRELVATINSGSRTNYADSVKGRFTISRDNSKNTLYLQMNSLRPEDTAVYYCQTSGSGSPNFWGQGTLVTVSS

SEQ ID NO: 2574 - protein, 125 aa, Artificial
  Nanobody sequence
EVQLLESGGGLVQPGGSLRLSCAASGRIFSLPASGNIFNLLTIAWYRQAPGKGRELVSTINSGSRTNYADSVKGRFTISRDNSKNTLYLQMNSLRPEDTAVYYCQTSGSGSPNFWGQGTLVTVSS

SEQ ID NO: 2575 - protein, 125 aa, Artificial
  Nanobody sequence
EVQLLESGGGLVQPGGSLRLSCAASGRIFSLPASGNIFNLLTIAWYRQAPGKGRELVATINSGSRTYYADSVKGRFTISRDNSKNTLYLQMNSLRPEDTAVYYCQTSGSGSPNFWGQGTLVTVSS

SEQ ID NO: 2576 - protein, 125 aa, Artificial
  Nanobody sequence
EVQLLESGGGLVQPGGSLRLSCAASGRIFSLPASGNIFNLLTIAWYRQAPGKGRELVSTINSGSRTYYADSVKGRFTISRDNSKNTLYLQMNSLRPEDTAVYYCQTSGSGSPNFWGQGTLVTVSS

SEQ ID NO: 2577 - protein, 125 aa, Artificial
  Nanobody sequence
EVQLLESGGGLVQPGGSLRLSCAASGRIFSLPASGNIFNLLTIAWYRQAPGKGRELVSTINSGSRTNYADSVKGRFTISRDNSKKTLYLQMNSLRPEDTAVYYCQTSGSGSPNFWGQGTLVTVSS

SEQ ID NO: 2578 - protein, 125 aa, Artificial
  Nanobody sequence
EVQLLESGGGLVQPGGSLRLSCAASGRIFSLPASGNIFNLLTIAWYRQAPGKGRELVATINSGSRTYYADSVKGRFTISRDNSKKTLYLQMNSLRPEDTAVYYCQTSGSGSPNFWGQGTLVTVSS

SEQ ID NO: 2579 - protein, 125 aa, Artificial
  Nanobody sequence
EVQLLESGGGLVQPGGSLRLSCAASGRIFSLPASGNIFNLLTIAWYRQAPGKGRELVSTINSGSRTYYADSVKGRFTISRDNSKKTLYLQMNSLRPEDTAVYYCQTSGSGSPNFWGQGTLVTVSS

SEQ ID NO: 2580 - protein, 128 aa, Artificial
  Nanobody sequence
EVQLVESGGGLVQPGGSLRLSCAASGRTLSSYAMGWFRQAPGKEREFVARISQGGTAIYYADSVKGRFTISRDNAKNTLYLQMNSLRPEDTAVYYCAKDPSPYYRGSAYLLSGSYDSWGQGTLVTVSS

SEQ ID NO: 2581 - protein, 128 aa, Artificial
  Nanobody sequence
EVQLVESGGGLVQPGGSLRLSCAASGRTLSSYAMGWFRQAPGKGREFVARISQGGTAIYYADSVKGRFTISRDNAKNTLYLQMNSLRPEDTAVYYCAKDPSPYYRGSAYLLSGSYDSWGQGTLVTVSS

SEQ ID NO: 2582 - protein, 128 aa, Artificial
  Nanobody sequence
EVQLVESGGGLVQPGGSLRLSCAASGRTLSSYAMGWFRQAPGKEREFVSRISQGGTAIYYADSVKGRFTISRDNAKNTLYLQMNSLRPEDTAVYYCAKDPSPYYRGSAYLLSGSYDSWGQGTLVTVSS

SEQ ID NO: 2583 - protein, 128 aa, Artificial
  Nanobody sequence
EVQLVESGGGLVQPGGSLRLSCAASGRTLSSYAMGWFRQAPGKEREFVARISQGGTAIYYADSVKGRFTISRDNSKNTLYLQMNSLRPEDTAVYYCAKDPSPYYRGSAYLLSGSYDSWGQGTLVTVSS

SEQ ID NO: 2584 - protein, 128 aa, Artificial
  Nanobody sequence
EVQLLESGGGLVQPGGSLRLSCAASGRTLSSYAMGWFRQAPGKGREFVSRISQGGTAIYYADSVKGRFTISRDNSKNTLYLQMNSLRPEDTAVYYCAKDPSPYYRGSAYLLSGSYDSWGQGTLVTVSS

SEQ ID NO: 2585 - protein, 128 aa, Artificial
  Nanobody sequence
EVQLLESGGGLVQPGGSLRLSCAASGRTLSSYAMGWFRQAPGKGREFVARISQGGTAIYYADSVKGRFTISRDNSKNTLYLQMNSLRPEDTAVYYCAKDPSPYYRGSAYLLSGSYDSWGQGTLVTVSS

SEQ ID NO: 2586 - protein, 128 aa, Artificial
  Nanobody sequence
EVQLVESGGGLVQPGGSLRLSCIASGLPFSTKSMGWFRQAPGKGREFVARISPGGTSRYYGDFVKGRFAISRDNAKNTTWLQMNSLKAEDTAVYYCASGERSTYIGSNYYRTNEYDYWGTGTLVTVSS

SEQ ID NO: 2587 - protein, 128 aa, Artificial
  Nanobody sequence
EVQLVESGGGLVQPGGSLRLSCAASGLPFSTKSMGWFRQAPGKGREFVARISPGGTSRYYGDFVKGRFAISRDNAKNTTWLQMNSLKAEDTAVYYCASGERSTYIGSNYYRTNEYDYWGTGTLVTVSS

SEQ ID NO: 2588 - protein, 128 aa, Artificial
  Nanobody sequence
EVQLVESGGGLVQPGGSLRLSCIASGLPFSTKSMGWFRQAPGKGREFVSRISPGGTSRYYGDFVKGRFAISRDNAKNTTWLQMNSLKAEDTAVYYCASGERSTYIGSNYYRTNEYDYWGTGTLVTVSS

SEQ ID NO: 2589 - protein, 128 aa, Artificial
  Nanobody sequence
EVQLVESGGGLVQPGGSLRLSCIASGLPFSTKSMGWFRQAPGKGREFVARISPGGTSRYYADFVKGRFAISRDNAKNTTWLQMNSLKAEDTAVYYCASGERSTYIGSNYYRTNEYDYWGTGTLVTVSS

SEQ ID NO: 2590 - protein, 128 aa, Artificial
  Nanobody sequence
EVQLVESGGGLVQPGGSLRLSCIASGLPFSTKSMGWFRQAPGKGREFVARISPGGTSRYYGDSVKGRFAISRDNAKNTTWLQMNSLKAEDTAVYYCASGERSTYIGSNYYRTNEYDYWGTGTLVTVSS

SEQ ID NO: 2591 - protein, 128 aa, Artificial
  Nanobody sequence
EVQLVESGGGLVQPGGSLRLSCIASGLPFSTKSMGWFRQAPGKGREFVARISPGGTSRYYGDFVKGRFTISRDNAKNTTWLQMNSLKAEDTAVYYCASGERSTYIGSNYYRTNEYDYWGTGTLVTVSS

SEQ ID NO: 2592 - protein, 128 aa, Artificial
  Nanobody sequence
EVQLVESGGGLVQPGGSLRLSCIASGLPFSTKSMGWFRQAPGKGREFVARISPGGTSRYYGDFVKGRFAISRDNSKNTTWLQMNSLKAEDTAVYYCASGERSTYIGSNYYRTNEYDYWGTGTLVTVSS

SEQ ID NO: 2593 - protein, 128 aa, Artificial
  Nanobody sequence
EVQLVESGGGLVQPGGSLRLSCIASGLPFSTKSMGWFRQAPGKGREFVARISPGGTSRYYGDFVKGRFAISRDNAKNTLWLQMNSLKAEDTAVYYCASGERSTYIGSNYYRTNEYDYWGTGTLVTVSS

SEQ ID NO: 2594 - protein, 128 aa, Artificial
  Nanobody sequence
EVQLVESGGGLVQPGGSLRLSCIASGLPFSTKSMGWFRQAPGKGREFVARISPGGTSRYYGDFVKGRFAISRDNAKNTTYLQMNSLKAEDTAVYYCASGERSTYIGSNYYRTNEYDYWGTGTLVTVSS

SEQ ID NO: 2595 - protein, 128 aa, Artificial
  Nanobody sequence
EVQLVESGGGLVQPGGSLRLSCIASGLPFSTKSMGWFRQAPGKGREFVARISPGGTSRYYGDFVKGRFAISRDNAKNTTWLQMNSLRAEDTAVYYCASGERSTYIGSNYYRTNEYDYWGTGTLVTVSS

SEQ ID NO: 2596 - protein, 128 aa, Artificial
  Nanobody sequence
EVQLVESGGGLVQPGGSLRLSCIASGLPFSTKSMGWFRQAPGKGREFVARISPGGTSRYYGDFVKGRFAISRDNAKNTTWLQMNSLKAEDTAVYYCASGERSTYIGSNYYRTNEYDYWGQGTLVTVSS

SEQ ID NO: 2597 - protein, 128 aa, Artificial
  Nanobody sequence
EVQLLESGGGLVQPGGSLRLSCAASGLPFSTKSMGWFRQAPGKGREFVSRISPGGTSRYYGDFVKGRFTISRDNSKNTLYLQMNSLRAEDTAVYYCASGERSTYIGSNYYRTNEYDYWGQGTLVTVSS

SEQ ID NO: 2598 - protein, 126 aa, Artificial
  Nanobody sequence
EVQLLESGGGLVQPGGSLRLSCAASGFTLDYLAIGWFRQAPGKGREGVSCVSSSGQYTYYADSVKGRFTISRDNSESTVYLQMNSLRPEDTAVYYCATDPECYRVRGYYNGEYDYWGQGTLVTVSS

SEQ ID NO: 2599 - protein, 126 aa, Artificial
  Nanobody sequence
EVQLLESGGGLVQPGGSLRLSCAASGFTLDYLAIGWFRQAPGKGREGVSCVSSSGQYTYYADSVKGRFTISRDNAENTVYLQMNSLRPEDTAVYYCATDPECYRVRGYYNGEYDYWGQGTLVTVSS

SEQ ID NO: 2600 - protein, 126 aa, Artificial
  Nanobody sequence
EVQLLESGGGLVQPGGSLRLSCAASGFTLDYLAIGWFRQAPGKGREGVSCVSSSGQYTYYADSVKGRFTISRDNSENTVYLQMNSLRPEDTAVYYCATDPECYRVRGYYNGEYDYWGQGTLVTVSS

SEQ ID NO: 2601 - protein, 126 aa, Artificial
  Nanobody sequence
EVQLLESGGGLVQPGGSLRLSCAASGFTLDYLAIGWFRQAPGKGREGVSCVSSSGQYTYYADSVKGRFTISRDNSKNTVYLQMNSLRPEDTAVYYCATDPECYRVRGYYNGEYDYWGQGTLVTVSS

SEQ ID NO: 2602 - protein, 126 aa, Artificial
  Nanobody sequence
EVQLLESGGGLVQPGGSLRLSCAASGFTLDYLAIGWFRQAPGKGREGVSCVSSSGQYTYYADSVKGRFTISRDNSKNTLYLQMNSLRPEDTAVYYCATDPECYRVRGYYNGEYDYWGQGTLVTVSS

SEQ ID NO: 2603 - protein, 125 aa, Artificial
  Nanobody sequence
EVQLVESGGGLVQPGGSLRLSCAASGFTLDDYAIAWFRQAPGKGREGVSGIDSGDGSAYYADSVKGRFTISSDNAKNTLYLQMNSLRPEDTAVYYCARVRTGWGLNAPDYAMDYWGKGTLVTVSS

SEQ ID NO: 2604 - protein, 125 aa, Artificial
  Nanobody sequence
EVQLVESGGGLVQPGGSLRLSCAASGFTLDDYAIAWFRQAPGKGREGVSGIDSGDGSAYYADSVKGRFTISRDNAKNTLYLQMNSLRPEDTAVYYCARVRTGWGLNAPDYAMDYWGKGTLVTVSS

SEQ ID NO: 2605 - protein, 125 aa, Artificial
  Nanobody sequence
EVQLVESGGGLVQPGGSLRLSCAASGFTLDDYAIAWFRQAPGKGREGVSGIDSGDGSAYYADSVKGRFTISSDNSKNTLYLQMNSLRPEDTAVYYCARVRTGWGLNAPDYAMDYWGKGTLVTVSS

SEQ ID NO: 2606 - protein, 125 aa, Artificial
  Nanobody sequence
EVQLVESGGGLVQPGGSLRLSCAASGFTLDDYAIAWFRQAPGKGREGVSGIDSGDGSAYYADSVKGRFTISSDNAKNTLYLQMNSLRPEDTAVYYCARVRTGWGLNAPDYAMDYWGQGTLVTVSS

SEQ ID NO: 2607 - protein, 129 aa, Artificial
  Nanobody sequence
EVQLLESGGGLVQPGGSLRLSCAVSGDTFSVYGMGWFRQAPGMGREFVAGISWNAGITAYTDTLKGRFTISRDRAKNTMYLQMNSLQPEDTAVYYCAADVTRHYIATRSKVDASMYDYWGQGTLVTVSS

SEQ ID NO: 2608 - protein, 129 aa, Artificial
  Nanobody sequence
EVQLLESGGGLVQPGGSLRLSCAASGDTFSVYGMGWFRQAPGMGREFVAGISWNAGITAYTDTLKGRFTISRDRAKNTMYLQMNSLQPEDTAVYYCAADVTRHYIATRSKVDASMYDYWGQGTLVTVSS

SEQ ID NO: 2609 - protein, 129 aa, Artificial
  Nanobody sequence
EVQLLESGGGLVQPGGSLRLSCAVSGDTFSVYGMGWFRQAPGKGREFVAGISWNAGITAYTDTLKGRFTISRDRAKNTMYLQMNSLQPEDTAVYYCAADVTRHYIATRSKVDASMYDYWGQGTLVTVSS

SEQ ID NO: 2610 - protein, 129 aa, Artificial
  Nanobody sequence
EVQLLESGGGLVQPGGSLRLSCAVSGDTFSVYGMGWFRQAPGMGREFVSGISWNAGITAYTDTLKGRFTISRDRAKNTMYLQMNSLQPEDTAVYYCAADVTRHYIATRSKVDASMYDYWGQGTLVTVSS

SEQ ID NO: 2611 - protein, 129 aa, Artificial
  Nanobody sequence
EVQLLESGGGLVQPGGSLRLSCAVSGDTFSVYGMGWFRQAPGMGREFVAGISWNAGITAYTDTLKGRFTISRDNAKNTMYLQMNSLQPEDTAVYYCAADVTRHYIATRSKVDASMYDYWGQGTLVTVSS

SEQ ID NO: 2612 - protein, 129 aa, Artificial
  Nanobody sequence
EVQLLESGGGLVQPGGSLRLSCAVSGDTFSVYGMGWFRQAPGMGREFVAGISWNAGITAYTDTLKGRFTISRDRSKNTMYLQMNSLQPEDTAVYYCAADVTRHYIATRSKVDASMYDYWGQGTLVTVSS

SEQ ID NO: 2613 - protein, 129 aa, Artificial
  Nanobody sequence
EVQLLESGGGLVQPGGSLRLSCAVSGDTFSVYGMGWFRQAPGMGREFVAGISWNAGITAYTDTLKGRFTISRDRAKNTLYLQMNSLQPEDTAVYYCAADVTRHYIATRSKVDASMYDYWGQGTLVTVSS

SEQ ID NO: 2614 - protein, 129 aa, Artificial
  Nanobody sequence
EVQLLESGGGLVQPGGSLRLSCAVSGDTFSVYGMGWFRQAPGMGREFVAGISWNAGITAYTDTLKGRFTISRDRAKNTMYLQMNSLRPEDTAVYYCAADVTRHYIATRSKVDASMYDYWGQGTLVTVSS

SEQ ID NO: 2615 - protein, 386 aa, Artificial
  Nanobody construct
EVQLLESGGGLVQPGGSLRLSCAASGRIFSLPASGNIFNLLTIAWYRQAPGKGRELVATINSGSRTNYADSVKGRFTISRDNSKKTLYLQMNSLRPEDTAVYYCQTSGSGSPNFWGQGTLVTVSSGGGGSGGGSEVQLVESGGGLVQPGNSLRLSCAASGFTFSSFGMSWVRQAPGKGLEWVSSISGSGSDTLYADSVKGRFTISRDNAKTTLYLQMNSLRPEDTAVYYCTIGGSLSRSSQGTLVTVSSGGGGSGGGSEVQLLESGGGLVQPGGSLRLSCAASGRTLSSYAMGWFRQAPGKGREFVSRISQGGTAIYYADSVKGRFTISRDNSKNTLYLQMNSLRPEDTAVYYCAKDPSPYYRGSAYLLSGSYDSWGQGTLVTVSS

SEQ ID NO: 2616 - protein, 386 aa, Artificial
  Nanobody construct
EVQLLESGGGLVQPGGSLRLSCAASGRIFSLPASGNIFNLLTIAWYRQAPGKGRELVATINSGSRTYYADSVKGRFTISRDNSKKTLYLQMNSLRPEDTAVYYCQTSGSGSPNFWGQGTLVTVSSGGGGSGGGSEVQLVESGGGLVQPGNSLRLSCAASGFTFSSFGMSWVRQAPGKGLEWVSSISGSGSDTLYADSVKGRFTISRDNAKTTLYLQMNSLRPEDTAVYYCTIGGSLSRSSQGTLVTVSSGGGGSGGGSEVQLLESGGGLVQPGGSLRLSCAASGRTLSSYAMGWFRQAPGKGREFVSRISQGGTAIYYADSVKGRFTISRDNSKNTLYLQMNSLRPEDTAVYYCAKDPSPYYRGSAYLLSGSYDSWGQGTLVTVSS

SEQ ID NO: 2617 - protein, 386 aa, Artificial
  Nanobody construct
EVQLLESGGGLVQPGGSLRLSCAASGRIFSLPASGNIFNLLTIAWYRQAPGKGRELVATINSGSRTNYADSVKGRFTISRDNSKKTLYLQMNSLRPEDTAVYYCQTSGSGSPNFWGQGTLVTVSSGGGGSGGGSEVQLVESGGGLVQPGNSLRLSCAASGFTFRSFGMSWVRQAPGKEPEWVSSISGSGSDTLYADSVKGRFTISRDNAKTTLYLQMNSLKPEDTAVYYCTIGGSLSRSSQGTQVTVSSGGGGSGGGSEVQLLESGGGLVQPGGSLRLSCAASGRTLSSYAMGWFRQAPGKGREFVSRISQGGTAIYYADSVKGRFTISRDNSKNTLYLQMNSLRPEDTAVYYCAKDPSPYYRGSAYLLSGSYDSWGQGTLVTVSS

SEQ ID NO: 2618 - protein, 386 aa, Artificial
  Nanobody construct
EVQLLESGGGLVQPGGSLRLSCAASGRIFSLPASGNIFNLLTIAWYRQAPGKGRELVATINSGSRTYYADSVKGRFTISRDNSKKTLYLQMNSLRPEDTAVYYCQTSGSGSPNFWGQGTLVTVSSGGGGSGGGSEVQLVESGGGLVQPGNSLRLSCAASGFTFRSFGMSWVRQAPGKEPEWVSSISGSGSDTLYADSVKGRFTISRDNAKTTLYLQMNSLKPEDTAVYYCTIGGSLSRSSQGTQVTVSSGGGGSGGGSEVQLLESGGGLVQPGGSLRLSCAASGRTLSSYAMGWFRQAPGKGREFVSRISQGGTAIYYADSVKGRFTISRDNSKNTLYLQMNSLRPEDTAVYYCAKDPSPYYRGSAYLLSGSYDSWGQGTLVTVSS

SEQ ID NO: 2619 - protein, 292 aa, Artificial
  Nanobody construct
EVQLLESGGGLVQPGGSLRLSCAASGRIFSLPASGNIFNLLTIAWYRQAPGKGRELVATINSGSRTNYADSVKGRFTISRDNSKKTLYLQMNSLRPEDTAVYYCQTSGSGSPNFWGQGTLVTVSSGGGGSGGGGSGGGGSGGGGSGGGGSGGGGSGGGGSEVQLLESGGGLVQPGGSLRLSCAASGLPFSTKSMGWFRQAPGKGREFVSRISPGGTSRYYGDFVKGRFTISRDNSKNTLYLQMNSLRAEDTAVYYCASGERSTYIGSNYYRTNEYDYWGQGTLVTVSSGGGC

SEQ ID NO: 2620 - protein, 292 aa, Artificial
  Nanobody construct
EVQLLESGGGLVQPGGSLRLSCAASGRIFSLPASGNIFNLLTIAWYRQAPGKGRELVATINSGSRTYYADSVKGRFTISRDNSKKTLYLQMNSLRPEDTAVYYCQTSGSGSPNFWGQGTLVTVSSGGGGSGGGGSGGGGSGGGGSGGGGSGGGGSGGGGSEVQLLESGGGLVQPGGSLRLSCAASGLPFSTKSMGWFRQAPGKGREFVSRISPGGTSRYYGDFVKGRFTISRDNSKNTLYLQMNSLRAEDTAVYYCASGERSTYIGSNYYRTNEYDYWGQGTLVTVSSGGGC

SEQ ID NO: 2621 - protein, 873 aa, Artificial
  Nanobody construct
EVQLLESGGGLVQPGGSLRLSCAASGRIFSLPASGNIFNLLTIAWYRQAPGKGRELVATINSGSRTYYADSVKGRFTISRDNSKKTLYLQMNSLRPEDTAVYYCQTSGSGSPNFWGQGTLVTVSSGGGGSGGGGSGGGGSGGGGSGGGGSGGGGSGGGGSEVQLLESGGGLVQPGGSLRLSCAASGLPFSTKSMGWFRQAPGKGREFVSRISPGGTSRYYGDFVKGRFTISRDNSKNTLYLQMNSLRAEDTAVYYCASGERSTYIGSNYYRTNEYDYWGQGTLVTVSSDAHKSEVAHRFKDLGEENFKALVLIAFAQYLQQCPFEDHVKLVNEVTEFAKTCVADESAENCDKSLHTLFGDKLCTVATLRETYGEMADCCAKQEPERNECFLQHKDDNPNLPRLVRPEVDVMCTAFHDNEETFLKKYLYEIARRHPYFYAPELLFFAKRYKAAFTECCQAADKAACLLPKLDELRDEGKASSAKQRLKCASLQKFGERAFKAWAVARLSQRFPKAEFAEVSKLVTDLTKVHTECCHGDLLECADDRADLAKYICENQDSISSKLKECCEKPLLEKSHCIAEVENDEMPADLPSLAADFVESKDVCKNYAEAKDVFLGMFLYEYARRHPDYSVVLLLRLAKTYETTLEKCCAAADPHECYAKVFDEFKPLVEEPQNLIKQNCELFEQLGEYKFQNALLVRYTKKVPQVSTPTLVEVSRNLGKVGSKCCKHPEAKRMPCAEDYLSVVLNQLCVLHEKTPVSDRVTKCCTESLVNRRPCFSALEVDETYVPKEFNAETFTFHADICTLSEKERQIKKQTALVELVKHKPKATKEQLKAVMDDFAAFVEKCCKADDKETCFAEEGKKLVAASQAALGL

SEQ ID NO: 2622 - protein, 386 aa, Artificial
  Nanobody construct
EVQLLESGGGLVQPGGSLRLSCAASGRIFSLPASGNIFNLLTIAWYRQAPGKGRELVATINSGSRTYYADSVKGRFTISRDNSKKTLYLQMNSLRPEDTAVYYCQTSGSGSPNFWGQGTLVTVSSGGGGSGGGSEVQLVESGGGLVQPGNSLRLSCAASGFTFSSFGMSWVRQAPGKGLEWVSSISGSGSDTLYADSVKGRFTISRDNAKTTLYLQMNSLRPEDTAVYYCTIGGSLSRSSQGTLVTVSSGGGGSGGGSEVQLLESGGGLVQPGGSLRLSCAASGRTLSSYAMGWFRQAPGKGREFVARISQGGTAIYYADSVKGRFTISRDNSKNTLYLQMNSLRPEDTAVYYCAKDPSPYYRGSAYLLSGSYDSWGQGTLVTVSS

SEQ ID NO: 2623 - protein, 378 aa, Artificial
  Nanobody construct
EVQLVESGGGLVQPGGSLRLSCAASGFTFSSSVMFWLRQAPGKGLEWLSTIKPTGSTIYPGSGKGRFTISRDNAKNTLYLQINNLKPEDTALYYCARDIGGTVRGQGTQVTVSSGGGGSGGGSEVQLVESGGGLVQPGNSLRLSCAASGFTFRSFGMSWVRQAPGKEPEWVSSISGSGSDTLYADSVKGRFTISRDNAKTTLYLQMNSLKPEDTAVYYCTIGGSLSRSSQGTQVTVSSGGGGSGGGGSGGGGSEVQLVESGGGLVQAGGSLRLSCAASGRIFSLPASGNIFNLLTIAWYRQAPGKQRELVATINSGSRTNYADSVKGRFTISRDNAQKTVYLQMNNLKPEDTAVYYCQTSGSGSPNFWGQGTQVTVSS

SEQ ID NO: 2624 - protein, 388 aa, Artificial
  Nanobody construct
EVQLVESGGGSVQAGGSLRLSCKVSGIMFSDKGMGWFRQAPGKERETVAATNWSGGSTYYADSVKGRFTISRDNYKNTLHLQMASLKPEDTGIYYCAAAGDSWNSRRIEDYDYWGQGTQVTVSSGGGGSGGGSEVQLVESGGGLVQPGNSLRLSCAASGFTFRSFGMSWVRQAPGKEPEWVSSISGSGSDTLYADSVKGRFTISRDNAKTTLYLQMNSLKPEDTAVYYCTIGGSLSRSSQGTQVTVSSGGGGSGGGGSGGGGSEVQLVESGGGLVQAGGSLRLSCAASGRIFSLPASGNIFNLLTIAWYRQAPGKQRELVATINSGSRTNYADSVKGRFTISRDNAQKTVYLQMNNLKPEDTAVYYCQTSGSGSPNFWGQGTQVTVSS

SEQ ID NO: 2625 - protein, 386 aa, Artificial
  Nanobody construct
EVQLVESGGELVQAGGSLRLSCAASGSIVSISAMAWYRQAPGKQRERVATITRGGTPDYADSAKDRFTISRDNAKNTVSLQMNNLKPEDTAVYYCKAALRTPTHDYNYYDYWGQGTQVTVSSGGGGSGGGSEVQLVESGGGLVQPGNSLRLSCAASGFTFRSFGMSWVRQAPGKEPEWVSSISGSGSDTLYADSVKGRFTISRDNAKTTLYLQMNSLKPEDTAVYYCTIGGSLSRSSQGTQVTVSSGGGGSGGGGSGGGGSEVQLVESGGGLVQAGGSLRLSCAASGRIFSLPASGNIFNLLTIAWYRQAPGKQRELVATINSGSRTNYADSVKGRFTISRDNAQKTVYLQMNNLKPEDTAVYYCQTSGSGSPNFWGQGTQVTVSS

SEQ ID NO: 2626 - protein, 378 aa, Artificial
  Nanobody construct
EVQLVESGGGLVQAGGSLRLSCAASGRIFSLPASGNIFNLLTIAWYRQAPGKQRELVATINSGSRTNYADSVKGRFTISRDNAQKTVYLQMNNLKPEDTAVYYCQTSGSGSPNFWGQGTQVTVSSGGGGSGGGGSGGGGSEVQLVESGGGLVQPGNSLRLSCAASGFTFRSFGMSWVRQAPGKEPEWVSSISGSGSDTLYADSVKGRFTISRDNAKTTLYLQMNSLKPEDTAVYYCTIGGSLSRSSQGTQVTVSSGGGGSGGGSEVQLVESGGGLVQPGGSLRLSCAASGFTFSSSVMFWLRQAPGKGLEWLSTIKPTGSTIYPGSGKGRFTISRDNAKNTLYLQINNLKPEDTALYYCARDIGGTVRGQGTQVTVSS

SEQ ID NO: 2627 - protein, 388 aa, Artificial
  Nanobody construct
EVQLVESGGGLVQAGGSLRLSCAASGRIFSLPASGNIFNLLTIAWYRQAPGKQRELVATINSGSRTNYADSVKGRFTISRDNAQKTVYLQMNNLKPEDTAVYYCQTSGSGSPNFWGQGTQVTVSSGGGGSGGGGSGGGGSEVQLVESGGGLVQPGNSLRLSCAASGFTFRSFGMSWVRQAPGKEPEWVSSISGSGSDTLYADSVKGRFTISRDNAKTTLYLQMNSLKPEDTAVYYCTIGGSLSRSSQGTQVTVSSGGGGSGGGSEVQLVESGGGSVQAGGSLRLSCKVSGIMFSDKGMGWFRQAPGKERETVAATNWSGGSTYYADSVKGRFTISRDNYKNTLHLQMASLKPEDTGIYYCAAAGDSWNSRRIEDYDYWGQGTQVTVSS

SEQ ID NO: 2628 - protein, 386 aa, Artificial
  Nanobody construct
EVQLVESGGGLVQAGGSLRLSCAASGRIFSLPASGNIFNLLTIAWYRQAPGKQRELVATINSGSRTNYADSVKGRFTISRDNAQKTVYLQMNNLKPEDTAVYYCQTSGSGSPNFWGQGTQVTVSSGGGGSGGGGSGGGGSEVQLVESGGGLVQPGNSLRLSCAASGFTFRSFGMSWVRQAPGKEPEWVSSISGSGSDTLYADSVKGRFTISRDNAKTTLYLQMNSLKPEDTAVYYCTIGGSLSRSSQGTQVTVSSGGGGSGGGSEVQLVESGGELVQAGGSLRLSCAASGSIVSISAMAWYRQAPGKQRERVATITRGGTPDYADSAKDRFTISRDNAKNTVSLQMNNLKPEDTAVYYCKAALRTPTHDYNYYDYWGQGTQVTVSS

SEQ ID NO: 2629 - protein, 391 aa, Artificial
  Nanobody construct
EVQLVESGGGLVQPGGSLRLSCAASGFTLDYLAIGWFRQAPGKEREGVSCVSSSGQYTYYADSVKGRFTISRDNAESTVYLQMNSLKPEDTAVYYCATDPECYRVRGYYNGEYDYWGQGTQVTVSSGGGGSGGGSEVQLVESGGGLVQPGNSLRLSCAASGFTFRSFGMSWVRQAPGKEPEWVSSISGSGSDTLYADSVKGRFTISRDNAKTTLYLQMNSLKPEDTAVYYCTIGGSLSRSSQGTQVTVSSGGGGSGGGGSGGGGSEVQLVESGGGLVQAGGSLRLSCASSGRTFSIYARGWFRQAPGKEREFVAAIRSGLTTYSDSVKGRFTISRDIAKNTVFLQMNSLKSEDTAVYYCAAAVNYFTDFTDYSKRDSYDYWGQGTQVTVSS

SEQ ID NO: 2630 - protein, 371 aa, Artificial
  Nanobody construct
EVQLVESGGGLVQPGGSLRLSCAASGFTFSSSVMFWLRQAPGKGLEWLSTIKPTGSTIYPGSGKGRFTISRDNAKNTLYLQINNLKPEDTALYYCARDIGGTVRGQGTQVTVSSGGGGSGGGSEVQLVESGGGLVQPGNSLRLSCAASGFTFRSFGMSWVRQAPGKEPEWVSSISGSGSDTLYADSVKGRFTISRDNAKTTLYLQMNSLKPEDTAVYYCTIGGSLSRSSQGTQVTVSSGGGGSGGGSEVQLVESGGGSVQAGGSLRLSCKVSGIMFSDKGMGWFRQAPGKERETVAATNWSGGSTYYADSVKGRFTISRDNYKNTLHLQMASLKPEDTGIYYCAAAGDSWNSRRIEDYDYWGQGTQVTVSS

SEQ ID NO: 2631 - protein, 371 aa, Artificial
  Nanobody construct
EVQLVESGGGSVQAGGSLRLSCKVSGIMFSDKGMGWFRQAPGKERETVAATNWSGGSTYYADSVKGRFTISRDNYKNTLHLQMASLKPEDTGIYYCAAAGDSWNSRRIEDYDYWGQGTQVTVSSGGGGSGGGSEVQLVESGGGLVQPGNSLRLSCAASGFTFRSFGMSWVRQAPGKEPEWVSSISGSGSDTLYADSVKGRFTISRDNAKTTLYLQMNSLKPEDTAVYYCTIGGSLSRSSQGTQVTVSSGGGGSGGGSEVQLVESGGGLVQPGGSLRLSCAASGFTFSSSVMFWLRQAPGKGLEWLSTIKPTGSTIYPGSGKGRFTISRDNAKNTLYLQINNLKPEDTALYYCARDIGGTVRGQGTQVTVSS

SEQ ID NO: 2632 - protein, 380 aa, Artificial
  Nanobody construct
EVQLVESGGGSVQAGGSLRLSCKVSGIMFSDKGMGWFRQAPGKERETVAATNWSGGSTYYADSVKGRFTISRDNYKNTLHLQMASLKPEDTGIYYCAAAGDSWNSRRIEDYDYWGQGTQVTVSSGGGGSGGGSEVQLVESGGGLVQPGNSLRLSCAASGFTFRSFGMSWVRQAPGKEPEWVSSISGSGSDTLYADSVKGRFTISRDNAKTTLYLQMNSLKPEDTAVYYCTIGGSLSRSSQGTQVTVSSGGGGSGGGSEVQLVESGGGVVQAGESLRLSCAASGYNVKDYEMGWFRQAPGMEREFAAAISWRGSSTYYADSVKGRFTISRDNAKNTVYLQMSSLKPEDTAVYYCAAGRLYPSSRSRDYDYWGQGTQVTVSS

SEQ ID NO: 2633 - protein, 380 aa, Artificial
  Nanobody construct
EVQLVESGGGVVQAGESLRLSCAASGYNVKDYEMGWFRQAPGMEREFAAAISWRGSSTYYADSVKGRFTISRDNAKNTVYLQMSSLKPEDTAVYYCAAGRLYPSSRSRDYDYWGQGTQVTVSSGGGGSGGGSEVQLVESGGGLVQPGNSLRLSCAASGFTFRSFGMSWVRQAPGKEPEWVSSISGSGSDTLYADSVKGRFTISRDNAKTTLYLQMNSLKPEDTAVYYCTIGGSLSRSSQGTQVTVSSGGGGSGGGSEVQLVESGGGSVQAGGSLRLSCKVSGIMFSDKGMGWFRQAPGKERETVAATNWSGGSTYYADSVKGRFTISRDNYKNTLHLQMASLKPEDTGIYYCAAAGDSWNSRRIEDYDYWGQGTQVTVSS

SEQ ID NO: 2634 - protein, 378 aa, Artificial
  Nanobody construct
EVQLVESGGGLVQPGGSLRLSCAASGFTFSSSVMFWLRQAPGKGLEWLSTIKPTGSTIYPGSGKGRFTISRDNAKNTLYLQINNLKPEDTALYYCARDIGGTVRGQGTQVTVSSGGGGSGGGSEVQLVESGGGLVQPGNSLRLSCAASGFTFRSFGMSWVRQAPGKEPEWVSSISGSGSDTLYADSVKGRFTISRDNAKTTLYLQMNSLKPEDTAVYYCTIGGSLSRSSQGTQVTVSSGGGGSGGGGSGGGGSEVQLVESGGGLVQAGGSLRLSCAASGRTFEGNPMGWFRQASGKKREFVASIDWSGGITSYADSVKGRFTISRDNAKNTVYLQMNSLKPEDTAVYYCAASARFGSGSYYDLMYDYWGQGTQVTVSS

SEQ ID NO: 2635 - protein, 378 aa, Artificial
  Nanobody construct
EVQLVESGGGLVQPGGSLRLSCAASGFTFSSSVMFWLRQAPGKGLEWLSTIKPTGSTIYPGSGKGRFTISRDNAKNTLYLQINNLKPEDTALYYCARDIGGTVRGQGTQVTVSSGGGGSGGGSEVQLVESGGGLVQPGNSLRLSCAASGFTFRSFGMSWVRQAPGKEPEWVSSISGSGSDTLYADSVKGRFTISRDNAKTTLYLQMNSLKPEDTAVYYCTIGGSLSRSSQGTQVTVSSGGGGSGGGGSGGGGSEVQLVESGGRLVQAGGSLRLSCAASGRTFDSNPMGWFRQAPGKKREFVAIISGNGGITNYANSVKGRFTISRDNAKNTIYLQMNSLKPEDTAVYYCAASGLYGSGSVYDLMYDYWGQGTQVTVSS

SEQ ID NO: 2636 - protein, 387 aa, Artificial
  Nanobody construct
EVQLVESGGELVQAGGSLRLSCAASGSIVSISAMAWYRQAPGKQRERVATITRGGTPDYADSAKDRFTISRDNAKNTVSLQMNNLKPEDTAVYYCKAALRTPTHDYNYYDYWGQGTQVTVSSGGGGSGGGSEVQLVESGGGLVQPGNSLRLSCAASGFTFRSFGMSWVRQAPGKEPEWVSSISGSGSDTLYADSVKGRFTISRDNAKTTLYLQMNSLKPEDTAVYYCTIGGSLSRSSQGTQVTVSSGGGGSGGGGSGGGGSEVQLVESGGGMVQAGGSLRLSCTASGLTDNSYAMGWFRRAPGKEREFLTGLTLSGGSTYYADSVKGRFTTSRDSQKNTVSLQMNSLKPEDTAVYYCAANRFGYGSAAYTPDNYNYWAQGTQVTVSS

SEQ ID NO: 2637 - protein, 379 aa, Artificial
  Nanobody construct
EVQLVESGGELVQAGGSLRLSCAASGSIVSISAMAWYRQAPGKQRERVATITRGGTPDYADSAKDRFTISRDNAKNTVSLQMNNLKPEDTAVYYCKAALRTPTHDYNYYDYWGQGTQVTVSSGGGGSGGGSEVQLVESGGGLVQPGNSLRLSCAASGFTFRSFGMSWVRQAPGKEPEWVSSISGSGSDTLYADSVKGRFTISRDNAKTTLYLQMNSLKPEDTAVYYCTIGGSLSRSSQGTQVTVSSGGGGSGGGGSGGGGSEVQLVESGGGLVQTGGSLRLSCAASVINFRLADMDWYRQALGKQRELVASISTGYRTNYADFVKGRFTISRDNAKNTVYLQMDSLKPEDTAVYYCAARDLRGLRVDYWGQGTQVTVSS

SEQ ID NO: 2638 - protein, 390 aa, Artificial
  Nanobody construct
EVQLVESGGGLVQAGGSLRLSCASSGRTFSIYARGWFRQAPGKEREFVAAIRSGLTTYSDSVKGRFTISRDIAKNTVFLQMNSLKSEDTAVYYCAAAVNYFTDFTDYSKRDSYDYWGQGTQVTVSSGGGGSGGGSEVQLVESGGGLVQPGNSLRLSCAASGFTFRSFGMSWVRQAPGKEPEWVSSISGSGSDTLYADSVKGRFTISRDNAKTTLYLQMNSLKPEDTAVYYCTIGGSLSRSSQGTQVTVSSGGGGSGGGGSGGGGSEVQLVESGGGLVQAGGSLRLSCAASGRTFEGNPMGWFRQASGKKREFVASIDWSGGITSYADSVKGRFTISRDNAKNTVYLQMNSLKPEDTAVYYCAASARFGSGSYYDLMYDYWGQGTQVTVSS

SEQ ID NO: 2639 - protein, 387 aa, Artificial
  Nanobody construct
EVQLVESGGGLVQAGGSLRLSCAASGRTFSWSAVGWFRQAPGKEREFVAAIRWSGGSPYYADSVKDRFTISRDNAKNTVYLQMNSLRPEDTAVYLCGETSLFPTSRGSHYDTWGQGTQVTVSSGGGGSGGGSEVQLVESGGGLVQPGNSLRLSCAASGFTFRSFGMSWVRQAPGKEPEWVSSISGSGSDTLYADSVKGRFTISRDNAKTTLYLQMNSLKPEDTAVYYCTIGGSLSRSSQGTQVTVSSGGGGSGGGGSGGGGSEVQLVESGGGLVQAGGSLRLSCAASGRTFEGNPMGWFRQASGKKREFVASIDWSGGITSYADSVKGRFTISRDNAKNTVYLQMNSLKPEDTAVYYCAASARFGSGSYYDLMYDYWGQGTQVTVSS

SEQ ID NO: 2640 - protein, 381 aa, Artificial
  Nanobody construct
EVQLVESGGGLVQAGGSLRLSCASSGRTFSIYARGWFRQAPGKEREFVAAIRSGLTTYSDSVKGRFTISRDIAKNTVFLQMNSLKSEDTAVYYCAAAVNYFTDFTDYSKRDSYDYWGQGTQVTVSSGGGGSGGGSEVQLVESGGGLVQPGNSLRLSCAASGFTFRSFGMSWVRQAPGKEPEWVSSISGSGSDTLYADSVKGRFTISRDNAKTTLYLQMNSLKPEDTAVYYCTIGGSLSRSSQGTQVTVSSGGGGSGGGSEVQLVESGGGLVQAGASLRLSCAASGRTFRSYNMGWLRQAPGKEREFVATISWNAGIPYYADSVKGRFTISRDNAKNTVYLQMNSLKPEDTAVYYCAASNSWSSSARFYDYWGQGTQVTVSS

SEQ ID NO: 2641 - protein, 390 aa, Artificial
  Nanobody construct
EVQLVESGGGLVQAGGSLRLSCASSGRTFSIYARGWFRQAPGKEREFVAAIRSGLTTYSDSVKGRFTISRDIAKNTVFLQMNSLKSEDTAVYYCAAAVNYFTDFTDYSKRDSYDYWGQGTQVTVSSGGGGSGGGSEVQLVESGGGLVQPGNSLRLSCAASGFTFRSFGMSWVRQAPGKEPEWVSSISGSGSDTLYADSVKGRFTISRDNAKTTLYLQMNSLKPEDTAVYYCTIGGSLSRSSQGTQVTVSSGGGGSGGGGSGGGGSEVQLVESGGRLVQAGGSLRLSCAASGRTFDSNPMGWFRQAPGKKREFVAIISGNGGITNYANSVKGRFTISRDNAKNTIYLQMNSLKPEDTAVYYCAASGLYGSGSVYDLMYDYWGQGTQVTVSS

SEQ ID NO: 2642 - protein, 23 aa, Artificial
  C-terminal sequence
AAAEQKLISEEDLNGAAHHHHHH

SEQ ID NO: 2643 - protein, 397 aa, Artificial
  Nanobody construct
EVQLVESGGGSVQAGGSLRLSCKVSGIMFSDKGMGWFRQAPGKERETVAATNWSGGSTYYADSVKGRFTISRDNYKNTLHLQMASLKPEDTGIYYCAAAGDSWNSRRIEDYDYWGQGTPVTVSSGGGGSGGGGSGGGGSEVQLVESGGGLVQPGNSLRLSCAASGFTFRSFGMSWVRQAPGKEPEWVSSISGSGSDTLYADSVKGRFTISRDNAKTTLYLQMNSLKPEDTAVYYCTIGGSLSRSSQGTQVTVSSGGGGSGGGGSGGGGSEVQLVESGGGLVQAGGSLRLSCAASGRTLSSYAMGWFRQAPGKEREFVARISQGGTAIYYADSVKGRFTISRDNAKNTVYLQMNSLKPEDTAVYYCAKDPSPYYRGSAYLLSGSYDSWGQGTQVTVSS

SEQ ID NO: 2644 - protein, 398 aa, Artificial
  Nanobody construct
EVQLVESGGGLVQAGGSLRLSCAASGRTLSSYAMGWFRQAPGKEREFVARISQGGTAIYYADSVKGRFTISRDNAKNTVYLQMNSLKPEDTAVYYCAKDPSPYYRGSAYLLSGSYDSWGQGTQVTVSSGGGGSGGGGSGGGGSEVQLVESGGGLVQPGNSLRLSCAASGFTFRSFGMSWVRQAPGKEPEWVSSISGSGSDTLYADSVKGRFTISRDNAKTTLYLQMNSLKPEDTAVYYCTIGGSLSRSSQGTQVTVSSGGGGSGGGGSGGGGSEVQLVESGGGLVQAGGSLRLSCAASGRTFEGNPMGWFRQASGKKREFVASIDWSGGITSYADSVKGRFTISRDNAKNTVYLQMNSLKPEDTAVYYCAASARFGSGSYYDLMYDYWGQGTQVTVSS

SEQ ID NO: 2645 - protein, 371 aa, Artificial
  Nanobody construct
EVQLVESGGGFVQPGGSLRLSCAASASIFSGYTMGWYRQAPGKERELVTSISHRGGTNYADSVKGRFTISRENAKSTVYLQMNSLKPEDTGVYYCNRLINEASWGQGTQVTVSSGGGGSGGGSEVQLVESGGGLVQPGNSLRLSCAASGFTFRSFGMSWVRQAPGKEPEWVSSISGSGSDTLYADSVKGRFTISRDNAKTTLYLQMNSLKPEDTAVYYCTIGGSLSRSSQGTQVTVSSGGGGSGGGSEVQLVESGGGLVQPGGSLRLSCAASGFTLDDYTIAWFRQAPGKEREGVSCISSSALITFYADSVKGRFTISRDNAKNTVYLQMNSLKPEDTAVYYCAADRYYYCSGWPDENAYWGQGTQVTVSS

SEQ ID NO: 2646 - protein, 361 aa, Artificial
  Nanobody construct
EVQLVESGGGFVQPGGSLRLSCAASASIFSGYTMGWYRQAPGKERELVTSISHRGGTNYADSVKGRFTISRENAKSTVYLQMNSLKPEDTGVYYCNRLINEASWGQGTQVTVSSGGGGSGGGSEVQLVESGGGLVQPGNSLRLSCAASGFTFRSFGMSWVRQAPGKEPEWVSSISGSGSDTLYADSVKGRFTISRDNAKTTLYLQMNSLKPEDTAVYYCTIGGSLSRSSQGTQVTVSSGGGGSGGGSEVQLVESGGGFVQPGGSLRLSCAASASIFSGYTMGWYRQAPGKERELVTSISHRGGTNYADSVKGRFTISRENAKSTVYLQMNSLKPEDTGVYYCNRLINEASWGQGTQVTVSS

SEQ ID NO: 2647 - protein, 371 aa, Artificial
  Nanobody construct
EVQLVESGGGFVQPGGSLRLSCAASASIFSGYTMGWYRQAPGKERELVTSISHRGGTNYADSVKGRFTISRENAKSTVYLQMNSLKPEDTGVYYCNRLINEASWGQGTQVTVSSGGGGSGGGSEVQLVESGGGLVQPGNSLRLSCAASGFTFRSFGMSWVRQAPGKEPEWVSSISGSGSDTLYADSVKGRFTISRDNAKTTLYLQMNSLKPEDTAVYYCTIGGSLSRSSQGTQVTVSSGGGGSGGGSEVQLVESGGGSVQAGGSLRLSCKVSGIMFSDKGMGWFRQAPGKERETVAATNWSGGSTYYADSVKGRFTISRDNYKNTLHLQMASLKPEDTGIYYCAAAGDSWNSRRIEDYDYWGQGTPVTVSS

SEQ ID NO: 2648 - protein, 361 aa, Artificial
  Nanobody construct
EVQLVESGGGFVQPGGSLRLSCAASASIFSGYTMGWYRQAPGKERELVTSISHRGGTNYADSVKGRFTISRENAKSTVYLQMNSLKPEDTGVYYCNRLINEASWGQGTQVTVSSGGGGSGGGSEVQLVESGGGLVQPGNSLRLSCAASGFTFRSFGMSWVRQAPGKEPEWVSSISGSGSDTLYADSVKGRFTISRDNAKTTLYLQMNSLKPEDTAVYYCTIGGSLSRSSQGTQVTVSSGGGGSGGGSEVQLVESGGGLVQPGGSLRLSCAASGFTFSSSVMFWLRQAPGKGLEWLSTIKPTGSTIYPGSGKGRFTISRDNAKNTLYLQINNLKPEDTALYYCARDIGGTVRGQGTQVTVSS

SEQ ID NO: 2649 - protein, 9 aa, Artificial
  linker sequence
GGGGSGGGS

SEQ ID NO: 2650 - protein, 29 aa, Artificial
  linker sequence
GGGGSGGGSGGGGSGGGGSGGGGSGGGGS

SEQ ID NO: 2651 - protein, 35 aa, Artificial
  linker sequence
GGGGSGGGGSGGGGSGGGGSGGGGSGGGGSGGGGS

1. Protein or polypeptide, comprising at least one amino acid sequence that forms and/or essentially consist of a single (antigen) binding domain or binding unit, and/or that is capable of forming and/or of functioning as a single (antigen) binding domain or binding unit (optionally after suitable folding), and that is directed against the p19 subunit and at least one amino acid sequence that forms and/or essentially consist of a single (antigen) binding domain or binding unit, and/or that is capable of forming and/or of functioning as a single (antigen) binding domain or binding unit (optionally after suitable folding), and that is directed against the p40 subunit, optionally linked via a suitable linker, and optionally comprising one or more further amino acid sequences, binding domains and/or binding units.

2. Protein or polypeptide according to claim 1, in which the amino acid sequence that is directed against the p19 subunit is a p19+ sequence (i.e. an amino acid sequence that is capable of modulating, neutralizing, blocking and/or inhibiting the binding of a heterodimeric cytokine comprising a p19 subunit to its receptor), and in which the amino acid sequence that is directed against the p40 subunit is a p40+ sequence (i.e. an amino acid sequence that is capable of modulating, neutralizing, blocking and/or inhibiting the binding of a heterodimeric cytokine comprising a p40 subunit to its receptor).

3. Protein or polypeptide according to claim 1, in which the amino acid sequence that is directed against the p19 subunit is a p19+ sequence (i.e. an amino acid sequence that is capable of modulating, neutralizing, blocking and/or inhibiting the binding of a heterodimeric cytokine comprising a p19 subunit to its receptor), and in which the amino acid sequence that is directed against the p40 subunit is a p40− sequence (i.e. an amino acid sequence that is essentially not capable of modulating, neutralizing, blocking and/or inhibiting the binding of a heterodimeric cytokine comprising a p40 subunit to its receptor).

4. Protein or polypeptide according to claim 1, in which the amino acid sequence that is directed against the p19 subunit is a p19− sequence (i.e. an amino acid sequence that is essentially not capable of modulating, neutralizing, blocking and/or inhibiting the binding of a heterodimeric cytokine comprising a p19 subunit to its receptor), and in which the amino acid sequence that is directed against the p40 subunit is a p40+ sequence (i.e. an amino acid sequence that is capable of modulating, neutralizing, blocking and/or inhibiting the binding of a heterodimeric cytokine comprising a p40 subunit to its receptor).

5. (canceled)

6. Protein or polypeptide, comprising at least one amino acid sequence that forms and/or essentially consist of a single (antigen) binding domain or binding unit, and/or that is capable of forming and/or of functioning as a single (antigen) binding domain or binding unit (optionally after suitable folding), and that is directed against a first epitope or antigenic determinant on the p19 subunit and at least one further amino acid sequence that forms and/or essentially consist of a single (antigen) binding domain or binding unit, and/or that is capable of forming and/or of functioning as a single (antigen) binding domain or binding unit (optionally after suitable folding), and that is directed against a second epitope or antigenic determinant on the p19 subunit different from the first, optionally linked via a suitable linker, and optionally comprising one or more further amino acid sequences, binding domains and/or binding units.

7. Protein or polypeptide according to claim 6, in which the first amino acid sequence is a p19+ sequence (i.e. an amino acid sequence that is essentially capable of modulating, neutralizing, blocking and/or inhibiting the binding of a heterodimeric cytokine comprising a p19 subunit to its receptor), and in which the second amino acid sequence is a p19− sequence (i.e. an amino acid sequence that is essentially not capable of modulating, neutralizing, blocking and/or inhibiting the binding of a heterodimeric cytokine comprising a p19 subunit to its receptor).

8. Protein or polypeptide, comprising at least one amino acid sequence that forms and/or essentially consist of a single (antigen) binding domain or binding unit, and/or that is capable of forming and/or of functioning as a single (antigen) binding domain or binding unit (optionally after suitable folding), and that is directed against a first epitope or antigenic determinant on the p40 subunit and at least one further amino acid sequence that forms and/or essentially consist of a single (antigen) binding domain or binding unit, and/or that is capable of forming and/or of functioning as a single (antigen) binding domain or binding unit (optionally after suitable folding), and that is directed against a second epitope or antigenic determinant on the p40 subunit different from the first, optionally linked via a suitable linker, and optionally comprising one or more further amino acid sequences, binding domains and/or binding units.

9. Protein or polypeptide according to claim 7, in which the first amino acid sequence is a p40+ sequence (i.e. an amino acid sequence that is essentially capable of modulating, neutralizing, blocking and/or inhibiting the binding of a heterodimeric cytokine comprising a p40 subunit to its receptor), and in which the second amino acid sequence is a p40− sequence (i.e. an amino acid sequence that is essentially not capable of modulating, neutralizing, blocking and/or inhibiting the binding of a heterodimeric cytokine comprising a p40 subunit to its receptor).

10. (canceled)

11. Protein or polypeptide according to claim 1, in which each amino acid sequence that is comprised within said protein or polypeptide and that is directed against a subunit comprises an immunoglobulin fold or is capable of, under suitable conditions, forming an immunoglobulin fold.

12. (canceled)

13. Protein or polypeptide according to claim 1, in which each amino acid sequence that is comprised within said protein or polypeptide and that is directed against a subunit is a domain antibody (or an amino acid sequence that is suitable for use as a domain antibody), a single domain antibody (or an amino acid sequence that is suitable for use as a single domain antibody), a “dAb” (or an amino acid sequence that is suitable for use as a dAb) or a Nanobody™ (including but not limited to a VHH sequence) or another single variable domain, or any suitable fragment of any one thereof.

14. Protein or polypeptide that is directed against a heterodimeric protein, polypeptide, ligand or receptor that comprises:
at least a first subunit;
and
at least a second subunit;
wherein said protein or polypeptide at least comprises a first binding domain or binding unit that is directed against said first subunit and a second binding domain or binding unit that is directed against said second subunit.

15. Protein or polypeptide that is directed against a first heterodimeric protein, polypeptide, ligand or receptor that comprises:
at least a first subunit that is shared between said first heterodimeric protein, polypeptide, ligand or receptor and at least a second, different heterodimeric protein, polypeptide, ligand or receptor;
and
at least a second subunit that is not shared between said first heterodimeric protein, polypeptide, ligand or receptor and said second, different heterodimeric protein, polypeptide, ligand or receptor;
wherein said protein or polypeptide at least comprises a first binding domain or binding unit that is directed against said first (i.e. shared) subunit and a second binding domain or binding unit that is directed against said second (i.e. not shared) subunit.

16. Protein or polypeptide that is directed against a first heterodimeric protein, polypeptide, ligand or receptor that comprises:
at least a first subunit;
and
at least a second subunit;
wherein said protein or polypeptide at least comprises a first binding domain or binding unit that is directed against said first subunit and a second binding domain or binding unit different from said first binding domain or binding unit that is also directed against said first subunit, but against a different epitope, antigenic determinant or binding site on said first subunit.

17. Protein or polypeptide according to claim 15, which is directed against a ligand for a receptor, and which comprises at least one binding domain or binding unit that is capable of modulating, neutralizing, blocking and/or inhibiting the binding of the ligand to its (cognate) receptor and at least one binding domain or binding unit that is essentially not capable of modulating, neutralizing, blocking and/or inhibiting the binding of the ligand to its (cognate) receptor.

18. Protein or polypeptide according to claim 15, which is directed against a ligand for a receptor, in which both the first binding domain or binding unit as well as the second binding domain or binding unit are capable of modulating, neutralizing, blocking and/or inhibiting the binding of the ligand to its (cognate) receptor.

19. Protein or polypeptide according to claim 14, in which each binding domain or binding unit comprises an immunoglobulin fold or is capable of, under suitable conditions, forming an immunoglobulin fold.

20. (canceled)

21. Protein or polypeptide according to claim 14, in which each binding domain or binding unit is a domain antibody (or an amino acid sequence that is suitable for use as a domain antibody), a single domain antibody (or an amino acid sequence that is suitable for use as a single domain antibody), a “dAb” (or an amino acid sequence that is suitable for use as a dAb) or a Nanobody™ (including but not limited to a VHH sequence) or another single variable domain, or any suitable fragment of any one thereof.

22. Nucleotide sequence or nucleic acid encoding a protein or polypeptide according to claim 1.

23. Composition comprising at least one protein or polypeptide according to claim 1.

24. Pharmaceutical composition comprising at least one protein or polypeptide according to claim 1 and at least one pharmaceutically acceptable carrier, diluent or excipient and/or adjuvant.

25. Method for providing, constructing, and/or as part of (a nucleotide sequence and/or nucleic acid that encodes) a multivalent, multispecific and/or multiparatopic construct, protein and/or polypeptide that comprises a p19+ sequence (one or more) and one or more further binding domains or binding units, comprising use of (a nucleotide sequence and/or nucleic acid that encodes) the p19+ sequence.

26. Method for providing, constructing, and/or as part of (a nucleotide sequence and/or nucleic acid that encodes) a multivalent, multispecific and/or multiparatopic construct, protein and/or polypeptide that comprises a p19− sequence (one or more) and one or more further binding domains or binding units, comprising use of (a nucleotide sequence and/or nucleic acid that encodes) the p19− sequence.

27. Method for providing, constructing, and/or as part of (a nucleotide sequence and/or nucleic acid that encodes) a multivalent, multispecific and/or multiparatopic construct, protein and/or polypeptide that comprises a p40− sequence (one or more) and one or more further binding domains or binding units, comprising use of (a nucleotide sequence and/or nucleic acid that encodes) the p40− sequence.

28. Method for providing, constructing, and/or as part of (a nucleotide sequence and/or nucleic acid that encodes) a multivalent, multispecific and/or multiparatopic construct, protein and/or polypeptide that comprises a p40+ sequence (one or more) and one or more further binding domains or binding units, comprising use of (a nucleotide sequence and/or nucleic acid that encodes) the p40+ sequence.

29.-32. (canceled)

33. Method according to claim 25, in which the construct, protein and/or polypeptide comprises at least one least one binding domain or binding unit that is capable of modulating, neutralizing, blocking and/or inhibiting the binding of a heterodimeric cytokine to its (cognate) receptor.

34. Method for providing, constructing, and/or as part of (a nucleotide sequence and/or nucleic acid that encodes) a multispecific construct, protein and/or polypeptide that is directed against a heterodimeric protein, polypeptide, ligand or receptor, wherein said construct, protein and/or polypeptide comprises an amino acid sequence (one or more) and at least one further binding domain or binding unit, and wherein said one or more amino acid sequences are directed against a first subunit of the heterodimeric protein, polypeptide, ligand or receptor and at least one of said further binding domains or binding units is directed against a second subunit of the heterodimeric protein, polypeptide, ligand or receptor different from the first subunit, comprising use of (a nucleotide sequence and/or nucleic acid that encodes) the amino acid sequence that comprises or essentially consists of a single binding domain or binding unit.

35. Method according to claim 34, in which the construct, protein and/or polypeptide is a directed against a heterodimeric cytokine or against a heterodimeric receptor for a heterodimeric cytokine.

36. Method for providing, constructing, and/or as part of (a nucleotide sequence and/or nucleic acid that encodes) a biparatopic construct, protein and/or polypeptide that is directed against a heterodimeric protein, polypeptide, ligand or receptor, wherein said construct, protein and/or polypeptide comprises an amino acid sequence (one or more) and at least one further binding domain or binding unit, and wherein said one or more amino acid sequences are directed against a first subunit of the heterodimeric protein, polypeptide, ligand or receptor and at least one of said further binding domains or binding units is also directed against said first subunit, but to a different epitope or antigenic determinant on said subunit, comprising use of (a nucleotide sequence and/or nucleic acid that encodes) the amino acid sequence that comprises or essentially consists of a single binding domain or binding unit.

37. Method according to claim 36, in which the construct, protein and/or polypeptide is directed against a ligand for a receptor and comprises at least one binding domain or binding unit that is capable of modulating, neutralizing, blocking and/or inhibiting the binding of the ligand to its (cognate) receptor and at least one binding domain or binding unit that is essentially not capable of modulating, neutralizing, blocking and/or inhibiting the binding of the ligand to its (cognate) receptor.

38. Protein or polypeptide according to claim 14, that is directed against IL-23.
